United States Patent Application Publication US 2026/0058010 A1 - sequence listing, part 11

SEQ ID NO: 125 - DNA, 753677 bp, Homo sapiens
  source 1..753677: mol_type = genomic DNA
attgatcataaggcatattaacaagactattcattcatttacttattttattagtcatctctgtatttattaaatgtctgttgagtgtttactgtgttccaggtatatagacatgtaagttcatgtcttggtttggggttagatataatcaccagatatttctgtaatattgcacctaaatattttaatttcttgtttattagaagcagtgatccatgttttcattggactgtgaaagagctacttctactctaaggccacattgcctacatgaaataaattattgttaggaaattgccttgaaaagagaaacaagaccacaactcttagaagaattctgtaagtacccaatttattaataaaacaatatagcttaaatatttatgattttttcagtcatacaattttaccatcattcccaaaatgttgtgcatttggtgacatgtatttgcaagattaggatctataattgtaactgtggaaatcatagaaggcattttatttgcttgttaatactgctcccctcttcaaacaaacaacaaattttgccttgtgatttacttcttcatctctctgaccaaaaataaactccactttgtgccttttatgcttgcaaaaacacttgcctgtttccctgcaagaagattatacaagttaaacattcgtccttttggttccagactggccagcttatattgaaacaaaacacctcgaccccagacaataattccaggcatttctgcttatagaatttgttctcagaagtgatagaaaggaggcaagaaattcccacactaagctcaaaggtcaatttagtggaccagatatcgggagctgtactgcatagccatttgccatgtgtaagtttctattgttgtggttccagtgaagacgctttgagatcacttctagggattgacaccatccatgcagtggtgtgtgatgccacttttaagagggcagggactggccaggaggagcactttctagtcttatctaaggaagaggtgtgagtataaagcagcgagactgatttgaggtgtgcagcttctggagtcagtctcattactttctactgtcacctctggagacaggcaggacttttgtgctactgtcaggaagaggtgccattctcaagcagactagaagccacgctgtttttgatggtctccatcatgacaccctaaagtctagatcctcactcctcttggtatagtccagggactgcattagcatcacctgggacctagttaaagatgcagaatcttgggtcccacacagacctatgtatcacaatctgaattttaataagactctcaggtgatttgtgtacacagtataaagtatgagaggtgctgggctagatgacccagacttacctcaaaaagactcacctcagaaagaagaagtaaataaacctcttctttagtagagagaccattctcagcagggaggaattagagataacaactgcaaaaaccatgtgggtttttctttttttattttaaacatgcaaaatacagtccatgcatctgccattttaaaaagtctctcatcctatagcagataaaaccaagtatatttcgtctatcaacattcagtaaatgtttcaaaatgctttagagtgtaaagataagaaatttagcaaaatttcaacaaacctgtataaaaaatggatacagataccattttatttcaaggcgacatgctgtaatgtaaatagtaagttattgttatctgtgtttctttgtaaaaagttaacaatacaagggcttaacagatccaggcctcagggctacacatgcaaaaaaaattgtcagatagttaaaaatcaccaaaacgtgctatttttaaatgtgtatatgttgttggttttttaaagtacaggagtagtagaagtattaaatatgaaatattagcaggaatagtatttcagaactctgtaaaactgtgtggggagttcatggtgctagtgttctggaagattcatacatttctgatgaacattttggtttaattcctttgccattgtaatagtccacaacttggtttgggacttcagccagcacgctctttgccagggcagctggagatgcctgcagggaagaagaaatcatcatgacgttggcttctggtcaaggaatcagactcatcctaaaagatttgagtcctgctctgggcagctaagtttcattcactttcattcattcgttatttgtcaagggtctacttcaagcaatagttgtcagattgttggaaaatggacctttaatttcattattatatatttttatgcctgtctcaaactataaaactatttacatctgaagacgagtaaaagttggatgggagaatgaattgttctgcagttttatttctaattttcactcaattttagacacttatttatgttccaggtgccacactagggtttgagggtctatggttcttgcctcaggaaggctgtaatcacgaggggaactaggcatggccaatattaactatgaggtagaatatgacacatgctatagagcagcagtgtcacattacatgggagcttattagcaatgtagactcagacccaactcagagctactgaatcacaatctgccttttaacttgacgctctagtgattcatatgcatattaaaatttgagaagctcttctctagagaatcacaaacagtgaggccagggcataaaaaacatagagactaacttatcttggaggcttctaagaggaggtggcttttaagctgagcatattttaatacatagagaaggggtaggggaatggcatttgaccatcataggcatagtgagttacctgatggagctgaaggaagtgtgtatggcaggtgggggacgagggggtttaggggtagttgcaggattggttgggcatttggttggaaaattggcttgagaccaggtgatggagagtcttgaataccacactaattcatttagcctttattctatcagccttatggatctactgcatgattttggggtaggggcacaggaggaccatgtgatttatggtgatgattctgtagcagagaaaggttgaagctgatatcatacatggactctggagtcatgtagagctgggctttactcctggctctggcatttagtattaactgtacaacccctgggcaagcaatttcaatggcctgagcctcattattaactattattgaagagattgaaaacttgaggcagacttaacaagtgtttgagattccaaaagaaagagggctggactgaataccatgtgacctggttttcagttttttcttttctatgtggcttgccacttggccatttaactttactaagccccgctgttcttagaggcaaaagagaaaagaaaaataattcactctatctcacagagtctcaaaataagagacatgtatcttttaagcaatctgaaaacactgtaaagagtttttctcaagtgatctttcacattttgaagatgtcatagcatgatggacatttgtgatctacagatatccctttattttataaataactgctcagggttgtgtgttagaccatggtccatgtgtatactggggcagatacaaaagtcatttataccctttcctccctggctgtttctcatacaaaggttagaaagtcaaatccttgattttccagcttcctttacatctagggataacaatatgacccaattccatcctttgagatataagtgaaaatttcctgggggaggttttttggaaagcttttctctcctggttaaaagttaaaagacttttcccttgtgaaaagtcttcaacaatacaagagtttaacagattctggactcagggctacacatgcaaaaaaaatttcagataattaaaaatcaccaaaatgtgctatttttaaaggtgtatgtatttttttaagtacaggagtagtaaaagtattaaatatgaaatattagcaggagtagtatttcggaactctgtaaaagtgtgtggaggtcatggtgctagtgttctggaagacttgtacattttttcttttctgttttttttttttttttttgagatggagtctcactctgtcacccaggctggagtgcagtggtgcgatctcagctcactgtaacctccgcttcccggattcaagcaattctcctgcttcagcctccagagtagttgagattacaggtgcccaccaccgtgcccagctaattttatatttttagtagacatggggttttaccatattggccaggctggtctcgaactcctgacctcaggtgatccgcccgcctcagcatctcaaagtcctgagattacaggcgtgagccaccgcacccagccctgaagacttgtacatttctgatgaacattttggtttaatccctttgccattgtaatagtccaggacttagtttgggacttcagccaacatgctctggacacagttggccctatgtccctttcctcttcctttctatcttgaaatagaatgtgattactggagctatagcaaccattttatcattatgtaggaagagcaaagggaatcacaatgtgctggctctgacactattgaatcactgactccagcagcaatgagcccctaacttctagctacatgagaaaaatacgttctatttgtataatccagggtttctcaatcttgacactattgacatttggggctgaataattctttgtgtgggggactgtccggtgcactgcaggaagtttagcagcatccttggcctctacccactagatatgaatagaagccccatatttgttaccatcaaaaatgtcagatattccaaaatgtttcctggggcataatgttacccttggttaaaaaccatttatgtaatccctgtaagatggatttactgttgcttgcagcaaaaaatattcctaaaccaggctgtcaaatagatcttcctctgatgatggtaatattctatatctgtgctgtccagtatgggaggtcttagtctcacgcaactattgagtccttgaaataaagcaagtctgactgaggaactgagtttgaaattttattttctcttaatgaatttaaacgtaagtagctacatgtggttagtggctaccatattggacagcattgttcccaaaggatcccccatccccttgcatatctgtgctggcaagcaaataaggctttggggacatgtattgggtgggaaagggtcaagaatatgaatgaagctggtaataacagtaataaaagctttatttattaaccacctacatggaccaggcactatcttaagctttatatagacaacaccttatctttgcaatgcatgtatcatttacctcattttatagatgaaagtctgtggcatggaaaggttaaataacttgcccagagtcacaaagcttaaagcatatgatagtttgagtgtgtctcctaaattaatgtgctgggaacttaatgatcaatgcaacagggttgggaagtggggcctcataagatgtcagtatcatgggagcaggttagttatcatgagagtgggttgttataaaagagagtctgccccttgtgctttccttctccttgtgtcttacatgtttgcttgtgccttccatacttctgccatgagatgacccttgtaggtgctggtgctatgctcttggacttcccagactccaaaaccatgagccaaatacacttctgttctttatccagtctatgatattctgttatatgagcaggaaaaaagaccataacataacttgtgccctgtaagctctaaagctctgagttatcatgcagagcagaaaaagagaggcaattcatgagttaatggcttacataaaatgatttaagctgctaccttcccttttatttatggcttattgaattcaaagtagattagtttgggtaatgaaatggatttcaaaatctgatttgaaatccatgaagataagatgggtgagtatgcgcctggtgttcttccttggtcattcacagagcagccagagaatctgtgtagcacagagactgtgagcagcaccctacttccttgctctgccctgagcattcctcttgttgacaatgtccccaaaattccctgctctccaaggctctgtctttcctcaaacacttaacttaagctgtaagccttttcccatggctacctctctctgctttgaggtcctgtaacaacattttaattcttctcaaccacccacaggttgcttagcatgtgatttttctgctaatacctttctcccagtcatgcaattctccagtaaatgtcttgaggtgtggatccatggttctatcatttcattgtggtcctagtgactagcatgtgccttgcacagaacaagcattctgtaagtgttttggggaagaggaggagacttgagggtagaggttagaacctttcatagttcagtgacattgtgtcagcacacaagtgtgtgtggggaagtggggaggtgggggatgcagaggggagagagggtgatttggggaagttaatgaatctcctagagagtgaactctttgatcctgctgcactatgcaaagttatcactggtattcagtgatgtgtctatctattttgtctgtctgaaaagaatgcagcattaaaatcaggaagaacaccctttcctccatcttagacacctagggagaaactagcttcattaatgaacataattgcagcaaatttagcctgctctagctcatccgtctgtaaagaatactacttctttttgactctactccttgctgtccataggcagacaactttagggcttagtgcatctctttcattaatgagtacctttatttgaaaatctcttcctagggaaacttgaggatggcatataacaacacaattacccctcatccacatgcacagccctgggagcttgtgggaagattgactgctgttgctgttacttagaaactctctctgtgatcaactctgtagccagggattggttttctgctccttcagtgattttaattacactgcagccctccttaaaagtagagtagtaattgtgtggcagtacagttatgaacaatacctcatcatccaaggagccttggaatgtgcagttacttccctatgaagtctgggcaggtcatgaaatacagagttcagctgaggctgctgagctggtgatctatctgaattcttattttaaagcctgtccaaagaaagtggcacaacaaacagcaatttctgaagagcatatgctaaaggctctcacactaggactggtaccaggattacagtcaagtatgtatgggggtgggaggatggatggatcattgttttgatgatccatttagctttccacctctcatctgcaatttccttacacagtataggtgagagtccagtgtgaacccaagttgggagtcagatgtgtctggatatatctgataaactcagtatgaagaatgtcagggattcatttgaatgagtttttgactggaggagaaaggctttaccaaataaggttgaagtggaggggatggcatcctgcctgacccaaataactgatttgagccctatgcagggagggactgcagtggaagttaatgaagatactttccagcaggggtctttgagatgtggagacacatctcactgcattaatgactcaggtgacagaggggactcggtagcatggaaaggagaggattctcttcttttccaaggagaccacagataagcttcacggtactgaaggttctgaagattccctgttgccagggcagctcaagtttagtcaccagccctggggatggtattgttggcatctgcagcagtgcagagggcaaggcctcagtggaaagtaggggctgggcatatgctctcctcttgggtggctttcacaagaagcacaaaacaaaaaacacaaaggctatccagtaatacccaagttacccccacaggtgcctagacacagctaggatactctagaggggtcttcaggactaccattagccccaagggaggcttttatgaattcaagatgtccttctgggtgattacagctcagtaggtgcagggatttgtggaaatttaaaaaatgctccttcctccatggacacaatgtatcaaaacctgggaaggtgggaaaattgttactgagcattttttctatgtcatactagagcattgtctaatggttctgcctcaaggcccttggggaatgcaatgctgcttgactgacttactatttcttactggtaagagcccaagactgtaaagttaggtattaatttatagaaaactgatagcaggcgatttctggcccacagagagggcaattcaaagattactttttttttttttttttaccctcttggtcattaatcagttttcaatctaccttagcaaacttattcagcattttttcccactgactttaactgtcttatttatttactttttttgaaaccaactctcactctcatcacccaggctggagtgcagtggtgtgatctcggctcactgcaacctccacctccctgattcaagtgattctcctgcctcagcctcccgagtagctgggattacaggcgcctgccaccacgcccagctaatttttgtatttttagtagagatggagttttaccatgttggtcaggctggtctcaaactcctgacctcaggcgatacacccaccttggcctcccaaactgctgggattacaggggtgagccactgcacccagccttatatactcttttgaactaactttatcatcttgttttgaaggagttaaataaatttttgatgctgcttactatattttttatagaggatttaggtttctatcattttggaaatatactttgccaaggcaaacacagacttctgccaggccacatagcttgacaagcaaaacataagctgcatttcagtttctgcttggtactttgggcaggcacctttaggcagggaacaagctgcccatctgtaggcagtcctagatgcactagagatcctaaattatatgaattatagggcaagcatcagtgaaattttgcctacaatagttagcatggctcctgatctgtaactcaatttataatttttttctccaaagagtcatgctctatatatccttgttgtgggagatgacgtggcccaggaagggatagctaagccaggtcatctcccacagcaagggtatgtagagcatagctggtgttgcttcaagaatggtggatcaccataaacattggtggacaaatgtgggaggtgagcatgctttggttctgctcttccatgaaaagtgccccaatgtgtatatgcatacgtgtttgaagttcctgaagggcacgaactggacgatgtctcgaagaacaggctctcccttgggtgacctcagaatcccatcatcaccgtccagcatctgcatgtcactgaagtcagcgttccctactcccacgatgatgactgacatggggaggtgggaggcatggacaatggcctcccgggtgtcggccatgtctgtgataacaccatctgtcaggatcagcaggatgaagtattgctgcagtcagatgccccatgatgatgggggggggtgaagaggtgagggagacaaggacaatacaataccagttagacacccaggtggcctcactgcacattgaccaaagcaacagtgatgacagacattttttgaatgtgctgatagtcctaaaggcttagggttctgatgaatggagcttaaaggtaggcatggcaattatagcttaattataataactacctcactgacagttacaaagaaagagcagcaggccaagagttaggaggacaggcttcaaagcctcattctgtgagaccctgggacgatcccttaactcgtctgtgtctgagcttcttcatttctcaaatgaggggtgggacccaataatttatatgatcttctttacttgaagatatttaaaaatctaaagctatgacatccaatacaatgatgactaaccccatgagactactcagcccttgaaatgtggctagagcaagtgacgaactgaattttatattttatttaattgtaatgaatttaaatttaacattaaaattggatagccaattcagttattagaaacattttaagtatgtttggaacaacttcagtagattaatctactttttctttctttgtaactgtcagtgaggtagttattaaaattaagctgtaactataaaatctaaacaaagatcaagtatttatgataacttagcatccaaattgacatgctgtaagtataaaatacatgtggattttgaagacttattatacaaaatagaatgcaaattatttcattaataatttttttatatggagtacatgctaaaatgacaatatgttggctatgttggtttaaataaaatatataattaaaatggatttctctgtttctttttactttttaaaatacagttactgaagaatttaaaactgtatacataacttgtgttatatttccactggatggcactagtctaaagtcctgctataagagggtcagggttgcagtctctccctctgaaggccatgtgccacaaaggtggcagctcttctccaggcacacttgcagaaggttgcagtgctcccatggcttcctgctttaagtcctgacttctggcctgcagcctgcctggcccctttccatctggaaagctggaagatgactcagcagagatgggaattggaggaaaggtgctgtactcagcagcacagggaagccttggaaagtgctctggggcctggagaaggatgacccattggaggtcatcattatttttagtcaacatgagaggcatcatgatggcctttactggtaagaggaaagagaagcagattagtcagatgcagctcaggctaaacagaaaagaactttcaatataatcctgcaagatgcctaacatttataggtagtaagagtgagattaagccattccacgttaccatacttcaaaggagaaagattggatagaagagtgacattttgaaaacatctgattttgagaatcatatacttaatgttgcaaatagtttggtagtactaaagaatttcattttttttctgtgagcctgaaaaaatgttttaaatgaaaaatgtaagctggaggtaggtgaacttcacactgtgatgaagatagccacatgttctgaatgcttttcatacagtctaatgtaaaggctaattctgttccatgtccattaactaaccactcacccctagtcctagctgaattcccagtttggttttcagattcattcaagttgtatgtttccttctatgtctgtattttctgagttgtatatgttcacaaggaagttggcttgagagtttagagaaggctttcagtaggatgaagtgatggaggtggtagggaggtgcagagagaagcggcagaaagaggcaatgttggtggtttggggatggagggaaggagtataggacataccagaatcataagtcaccctctctagagtgcacctggaagaccagggcaggtggcacatccaaaaagagattacttctgattcatgagcaggtgggccctcgagtgaatcacacttctgtgtctcctacctttatcctctaccttcccctaactcctgtctgatctgatcttagagttcagtggatgaatctcccctacctgataaatgccttaagaaataaaacaacctgatagtcatactaccacattgagaaactttagagtcgtaatgttctacagcagaggtcaggaaactattttttgtcaagggacattaataagtattttaggctttgtagaccataatggtctctgtcacaactacctaacactgccactgtagtgtgaaaacagccatagacaatatttaaaatgaatatgagaggctgtgttccaataatattttatttatggacactgatttttaatgtcacaaaatcttcatatgtcacaaaatacaaatattattctacttttgattttttcaacaattaaaaaatctaaaaaccattctcagcttgcaagccattgaaaaacagtttagtttagttatagtttattgactgctgatctaaactaggggttcttaacctgtctccatggactactgcaagatttaaggcagtctgtaaacttggggtaaattacatttttattttcactaatctctaagtaaaatttatcattttttcactataagtgtaatcaacaaatcaaattaatattagttctacttgtggcttagttattaataaaaaaacacatattttcctgttatattacagtacctacatatatttcaatgtattatttatgtttaacacaacttagaaattacagaattattagacaaactactggttctcataatttaaaatgtaaatacagaagcattttattactgtatttatgatgtctccatcttccttttaaaaaatattttgctaactgcatttcaatataattggtttactttataatatgggtcttatgttgtacatttaaaaatacttctggctgggtgcagtggctcacgcctgtaatcctagcactttggaaggcctaggtgggcggatcatgaggtcaggagatcaagaccatcttggccaacatggtgaaaccctgtctctactaaaaatacaaaaattggctgggcgtggtggcacgtgcctgtaatcccagctactcgggaggctaaggcaggagaatcatttgaactagggagtcagaggttgcagtgagctgccactgcactccagcctggcaacagagcaagactccatctcaaacaaaacaaaacacaaaaaaccacacacacaaaaaaacacaaaaaaccacttctgagaagggatctatgaactttatcagctgctaaaggggtttgtggaacaataagtttaagaactcctggtctgaagagattgtcaggattctggaatctgatcctgccaggtttcatctagctaaaggcactaggctgtagactgcaggatcgaaacctgatagaaatttccaataaagcaaacaataacagttccttctaaagtcagactgggaaaatgctcatggatgaaatattatagtctttgaatatacttgaggtcctgtttagataaagaggggcattttttacctggaagagttccacaaaatcaaggggaaaatcctatagcaacagactccctggcacagcttgccaaagatgttcaagtttatgacccttagagataacaagggactctggaccacagacttttcaaagaacaggagaaacctctggggaaaagcttatgttcttggtctataggggtaatttatatggagatgtgtgggttggatgcttcttacttgtagtcccatttaatgacctgtcctttcattgcagacccagctatccctgagggagtgagtgatggccaaaaactcatgctgttctatatcagcctgaaatccagacctttgttagttctgttctctttttagccatgtgagtcctggtaccccagaggggatgagatcatccaatttttaaactgggccccagggagcccttagggatgccttggatgctcttgaggataagggagctaaagagaatggacaagtttctgactctactccttagaccaaatttggcaagaatagtgtattttttaagtctattttatatgttgagtttctaagcaagttatcatttgaagaattggttctggtgctgaaaaaaggttaaaaaataaaataaaataatggtcacatccaaaccttattcctaaatcttgcatctatgaaggttcaaatttgctccaagacctctgtggtcagaaagagatgcatttggggaagcctttgcagggcccacgcactggtggaaatgttggtctataatcctgagaagtgttggtggttagccagatgcattggctcatgcctataaccccagaacgttgggaggctaaagaaggaggattgtttgagcccaggagtttgagaccagcctgggcaacatagcaagaccccacctctacaaaaaatataaaaattagctgggcgtggtggcacatgcctttggtcccagctatttgggaggctggggccagaggaatgcttcagcccaaaaggttcaaagctgtagtgagccatgattgtgccactacacttcagcttgggtgatagaccaagaccctgtcgcaaaaaaaaaaaaaaaaaaaaaaaaaaaaaaaaaaaaaaaaaaaaaacctaatagtgttcatggcttctgaaaagaagaggaaaaatgagcagagaggagtcatgattttcttagctttcacacctggaaaagacttggcttggattaaatcctcagcattactgctggacaagatctcagcttacagagtgtctctgcccagcataaaggctaatatatccacagttttatatattcactattctaaagtaattatttgaagtaacacacacttagctccccagggtctccagtccttttcacagtcaaaccaccggttagtgatttcaagaacatgatgtaatgaacagaggagatgagagaacatgccccacagatcagacccatttgtttcttatggatagctatgggtcacctgatggatgttgtgtagcagattgaaactgtggtcaactatgttaataaaaggacatggaaaaattatgagtctaaaacaaaattttgcttcaaacttcctattcccttgtaggaattgctcatgtcactcaatgacccaagcccggagtagctgaagatgataatgagatgtatggaagggccagtggactgaaccaaagacatgcagtgactgttgttctctctagggaccttgggaatttggatctttttaagtaggagagacttcaaattataatgaaaacaggaacactgtattttctggcgtacaagatgtgcaatatttaagatacacaccagttttacaaaagaaaatgtaaagtacttttcattatatatatatatgaaaagtagagtggctttatatgcgttctttaagtagtatttattaagcatgtactgtgtgcaggcattgttttgtgtactagggatatactagtgaacaagtcttattgtagagcttccatatgaaagtagagagacataaaatatacaggttagtagatgcacctaaaatatttcagatgatgatgggtactaagaagaaaagtaaagctgagacatggtgcgggtgggtgggttggctattttagataaggtagccagggggaactttcagaggggttgagagttgagaagagatgttaacacagtcagagaatggatcatatggaggtttgggtgagagaaaccctggcaggggaacagtaagtgaaaaggcctcaaggtgggaatatatttggtgtgtttgtggaacagcaagaaggtcagtgtggctgaaatatagggagcgaaagagaaaatgataagaattaagatcagagaggtaggcagagattagatcctataatgtcttctaagccatatcagggaatttagattttactccaagtatgatgagaagtattagagaatttagaacaaaggaatgctgcaatactaattatatttttaaaagatcaatctggtttctgcatggagtgcagattataagtgggaaaaagttaaggacagtagctaaagggcaaagcagagtcaagggggagatattaacttaaagcaggagatattattgaatgagtacttgttaatgggaatgagtcttcagtacaaagggaagtagaaaagaaaacaatagatgataggagaaagagcgagaatataactgcagagtcaaagttcctggataattcagagatgtgctcaagtacacaaaagaagatgttgacatgaggtaggagcatggtcctccatccattctaacatgaaggaaggctgagaacatgaagacagtgcaagaaggttagatgaattgatgtaagaagataagggagtagtatttttttaaataaaaactcagtacccaggataaaattacagagcaaacttcagacattggtaatattccactaaatctggaaaaaatcataaagctaaaaagacatgtattaatgttattaaaataaatacagaagttattgtggtaatatatttacttctaaaatattaggggcaaaactcaaactctggtcttggtttgcatttttcttaagaaaagcaatagaatatgaaaccaatttttgctgtgatgttttgtgctgctgcgctttaccaccaggaggcagaatcatccattgttttacttccatggtgctttgcttccatctgtagtatgggtaccttaaaaagcaagcttatttttaaacctttcttttttcttttcaaggacaggaggtggatatgacatactttagtgaatatagtagcttccattgttgagtttctcctgtgttcagacaatgtggtagacatttgacatgtgtcatctcttagcctcacaacccagcaaagatgggtttgattatccccatgtttcagatgtcaagactgaggataggaggaggttaagtcatttgtccaaattcacacagggagaagtgttggaatttattgttagagtgagatgggtcttacggccaatatccaggtgaggaagagtaagctccccttaggaggcaaatagccccctccttaccgatgcctccttggtgttagtttcctctgacgctgacttggcaaccttctggatgatgggggcaatgttggtgggaccgtagagttggagcttaggaagacagctctgataggcttccacaactccttgaattcctgaggtgaaattggcaaagatcaacagctccagagtcactccaaatatatttatagccaaacacacacaaaagtaaagcattaaatatcccaaatagtccttatcaacatcatgtttatgttcttaagataaaaaggaataccacattgctagtgttgctgtctccttccccactgaaatcattctcctctttaaaagctaaagtcaaaagcaacgatttccacaaaattttccctaatatcctactttatatataagatttcattcgctcctcatagcataatgaaatagatgttatacccattttataggtgaagaaacagaggcttagagatgttcaatgatctgccctgggtcacatagcaagtgtgttcaagactcaggatttaaacttgggtctgcctggctctaagcactgtgttcttagccactagcaagctagcttcaatgttgcacttgtttccacacgatcttgttgactctagtagatactacccgtgccctctataagagtcaggagttcccatgaccatctctccagatgttatactctgcgggcaggaatcatgacttacttattttttgtatttccccaaagagcttgaggcagtatcgagcaaatgtaatgctcaccaagtgtgtgatgaatgagcaaagtggctgatatactcatctcctgggcactgagtacagataagtgatggttatcatcacggacaacccctcatttaaaagggggcttccatcctgaggccatatgagcccaggaaatagaaaaggatgggactctgccaggagaggcagtcctatctatacagcttctcctagtacttgatacatcttgactgtacatttcatgttatcattctgatcccacagcaataatctcattacaaatgatttttattcaaatggcttctcttgttgtctgtgcctgtgttattgcttgccttcccctattcagcttatccttctatccctttctattctgaaatagcacattagtcctgtttttggccagagggatccacacaattccctcctgagattattctccataaccaccatgcactgcaaaatagctcttgggtattttagatgagcaagttctgttctgttctgcccttacatacatgctcccaacctcattggcaatcctgcacccacttggccctgccccaaagcctatcattctaaagacagatgccaagtcattttgcagtctggttctgaagttaagtgatgctgaatagaagctccttatgtttttttggttcttgagcttttgcctaagataagcaagtttgatttcctcttgaaaagtatcaggcagatgaattctaagagtataaaacaggtgaataccagggtttatatttcattctgctgtgggggaaaccactcttacagttgcagaatgggggtggttggggatgaggaaagtctaatccataataaactgaggatgaagaatacattagtggaaaaaatggcagaatggagattgggtcttggaggttactgtgttcagactcaatggtattgatatcatattcttggccattaactgctagatgccttacacactctactggatctgaattaatcctgatttagcctccttcctccttgacaagaagagagagatatggacatttctaatgcaaaaatgtcttatgatcttcatagcaacataggtacttggctctgttagaaaacagaaaaaatcattctagaacaaaatttattataataattattatcatagtttcaatatcattattttgtgaaatcatgtcagagaattctggctggaaacaatggaacatgaaccagaacctttgagcaggctttctctggcacaaagccatgatgctgcttgttcaaactcgctgaggccatgtccttggccgatatgccgaaagtgggaaatgatttccatgttcccccctctccttatatcggcacagagatgaagttgtgaaaaaaaaaaaaaaaaaacacttgatgaaaatttggaaaacagaaagagggatattgtatcactgcctaccaggtgaagtttcatttattattattattattattatggcccaaggaatcccagactgggatcaacattattgccatacactcaagaccacctcttctgcattctgtcttttccagttcttattttcctgctctgttatcatggctttctcttgcctgtggagtagcatggtttatgttgatacagaaagcagagattctgtggacaatcgtaactaatatgctacaccagcagagatgaactaaaatgggaaagctgcaaagggaaggactgtgacactggctttctttcacgttgtgctttacctgcacattctgggttgtcttcattaaagttgattgcaaagtcatgagagacctagacaccgattaaaatttaaaaaacaggaagaaagaagaattacaactttaatccagtaagaaggcactggggtttagagtttgcaaacaaatgcccattatattcattatgtgttaagcagcaggaaccatttcaagcctttacacaatcaatatgagatggagggtgaattctaagctccctgtggagttgaggtgacaggaatattttctagaatcagataaatgctgtcaggaggggagaataaggcttataaaaaaatccaagaaaagatttcagaaagataactttgaatagctgctagttagaactggccacagactggaggcttagatttggctgagctctatttggacccagtgattaaaacaaaaataaaaacaaaaaaactcaataacccaagctgtctgctgaagatagcgatggttataaaagcttcagctaagcagttgacacttaagaatcattaacatgatatgcagaactacagggcaggaggattttcacatacctacaggtaaaacagactgcactctacttttggaaacatagtaaagtaatatactttgtaatatttcaacacaaattcctctacctggcagaacctatgcacaaggtcaaataacatattgtttacttttttctttccgaaaacctgataaaacaagatagatgttctggcatctggacatttttattgaatcatttggtattttatggagaatttcatttcaaaggatatttccaagctctgactcttttgggtatccataaattaggtcactgtgttaaaagacacctgttttcttagtgggaggtgatcggtgatgctctcagtgcttatcctagtcccttgctcttagcacttccaggtaagccagctgacttcagtcatcttatttgctttgtttaccttaagttttttcttggcctccagggcctgccttgcttgcccaagtgacaggctaaaagtgacccttgggagtaatcagtaattaacaggaggtgatgtatacatatcccagctcccttatcccttggggtccatgtgtgctgtatattgtctcctagggttcttcagcagagttaagcaccagttgccaacagcggtaactgacttgataatatactctgtgctgacttccacttcccaacctctattgtggtttccctcaccttttaaataaactatttgcatccaaacccttgtctcaagatctgtttctgagaaagtgctaactaagaaagagaggtgcttgtgtttcagtttcaatgcatactttcagattttgtcctaagaagtaaattgtggcaaccttgtaaactctcctgggggcacctgagctgctcaaatcatcagtgcttgtctgaggaatgggagaaattaggggacccgaaatggggaaatgtgagagatgcctattgaaacaagaataaccaggggattttgctgacaggaaggatggagttaggggatcaagtgaacaagaggacttcagaaaacagcaagaaagattagttactccaggaagggaaccaaaaagatgtcattagtgagaaaaaggtatggtgcatagctctgtcctcagccctgttgggccaacctgaggctggaagaccacctggtggggatgtggtgaaaactcaagaatccctgggtagttgggctgatggctattgagctattcagcagctctatgaagaaagtgggcattcacctgtttacattcccgatttgaaggggcctatatctcctcagctccagcttattcttgtatcggtcatcttttaatcttagtgttgccaggcctttcaggttttcaagagaaaccagaaatctgacattttatatatgcaattgctgaattcgttttttaaaagtgtgtcaaatataacatatttgtggcctgaataatgtctataggccaccagttgataactcttgttctatattctttctctccacaagctgtatttctaataaatgcttctagaattatgtagctatgcccagcagaaaggccagtgtggaatacaaggcaagaaagaaggagaacaggtcagggagacaagcgattccatccactattcactctaggagcaacagggatattgatttcctctttcaaaaaggatacctaaggggaaagccctttatatgatggctctagtgagggagcaaatgtcagcatctacctcctcacctgtggctcagacacagccagtaaaagagaaattgaggattgggcagtgttgtttgtacttagctcagacctcagaggcactggtaaggtggaggctgggagaggtaccctgctgtctctccaaggccctgtccacctagtgggcacgagttctctgtggagaatgttctacaggagcatctagaatatcacagtagtgtctcagcctcattacagtgcaaatttatctacacacaatctttgccttttttctgtcatgagaaatcattatcaaaaccaaataggattccaacgtcttcagaagaacatttcagcttcccaattctctaagtcataatagttctttcttcaaaacttctctgtgtctcccatacaagacttggactcggagacttgggataagaaagtctgtagactccattgtcacggactttcccagttggcattgccaatagaattctatttcctaggggatatacgagtgaataggttctgagcccctggagatcaacttcttgagtgttttctcagactctgaccacatttataagaaactaaacaatgaaactcttcatctggacctctgagaagacccatccaaaataccaggagatagggtttcatcaagagacgggccctggcgagttaatctcactgattctgaagacaatttctgactctgtaggccctactgacacagttaggtcagagtcaggagtgtgagactgctgcaaagaagagccaagttatcctttgaccacagtgaagtggaagaagatcacatctccactcactcaccgtgtactctggaggtatcctggcgccaaacccaaaggcagggaacattttgtcactgaaaccaaaatgaagaaaagaaaaaacaagaagttgcttcatttattcatttaatgagaaagaaaaacattaacctacattactaggttgctaggccatgttgctatgccagtgctgactcatgcttcttgattgtctgtggtgatgggggtagcaatagcatggataattaaaatcaagaaacagccccttaagttcattacagtcattagtctacaacttcctcccttaatttttttgctagattctatactaagaaataaaatggccctaccctttcatcaatggcctccacttcaactttcaactttgtttcctttgaaaagtgaccatgaactaggtaactgtaatggttgactgtgttagaaccttttgtatgtatcatcttttaaaatacaaggagagatagttattccccttctgcaggtggggaaatgccttgagaggtaaagtgacttgcccaagatcatgccactaattagagctagagttcaaatacagataagactgaatcgaaatggatattaaaaagcaatggggccaggtgcagtggctcactcctgtaatcccagaactttgggaggccgaggtgggtagatcacttgaggccaggagttcaagaccagtctggccaacatggagaaaccccatctctactaaaaatacaaaaattagctgggcatggtggtgcactcctgtaatcccagctactcaggaggctgaggcataagagaattgcttgaaccctggaggtggaggctgcagtgagctaagaatgcaccattgcactccagcctgggtaatagaccaagactctatctcaaaagcaaaaaacaagcagtggaaagcttgtaagtttggctaatttgacagagcttggttccctctacatgactcattgtgcccaccaccttatcacatacaagcggtgataagttgtttacatgtcttttcttgttttttgaactcaaagagaccctgtctttggtattaaaatctttatatctctactgtcttctgcctcaactgccccctgccccaccatttattatagaacttgtcatggaatgtgtgctcagtagttaatgagtacataatccatgaattttaattattaaaatgtggctatgaaaagaagggaggattcttgtgaaaacctgagagaatcacttacatatcctttggtttgagttatcttatgcacactggagtttctctcttaattatgcattcacatatattggatcttaactctaactttactgtactatagttgacaggatggggaagagaataattaacatttattgatgcatacaatgtaccagccccctgctagatgatgtatctatttattaaattctcacacaatcctggaagcttcacctacttattatttccattttacaggtaaatagagcctcagaaaggctaagtggcctatggtgattaccaaggagaattgtgtgattccaaagcccatacctttctgttataccattataatttaatgattatatgtagtattaaatgtgattttctgctagtacttccagtaatctggccccctgcctagacaacaaataagaccctctttaatcgaatagttgtgctgtcgggtggctgtcgccatagggctcttggcaaggacgtgtccttctcatgtcatctaccttttatttcttctcccattaagaaattaactgagatttgttctttggaacaattcctacatttcactgttcttggtatattcagtcaattcaggttagggctcactgtcctaaacatctataaggaaaaagggatgagccccactaatccccaggctgacagaaaagtcaaagtagcaaagctagattctcctttatcaccacctgactgattaagagctcattactagccaatgatggttttgacaaaactttaccaaaacatagccaattgtatcaaatttggggttaggggctgggagatacaaggaagctggaattctttgaaatcgaagtctaaattctccagaaaatcaccaactcccacttctcctcactgttgggtcaatccaggctttgtggtgcattgcatctagcaggtattagataaggtattaatgtgggtaaatagagactcacaacagcttatgaaggattagctatagataggagaaaatatacttctgggtccttggacatactgaaatactttgcctcagcaattcctccttaaacaaaacaagcatgggtaggtgtgagaagagatctgtgcgggggattttagggtactttctagttaagcctgaagtaaggcttttctgggtggaggatggatcctggtccttcacactcgaggatgacccagaagtcaaaatagagaaactgggagtctccacacccttattttctttttttgatgagttgaggaggggtaagctctaacattccatccatttctaatccctatggtgttctagcgttaatgatattccttttatactttctaagccacttttggggattcaatgtttgctgagcatgatgcactgctatgtaatcgagtttcaagagtaggaaggtagggaaaatgcctcacctacaaggggaataattaatgagccaggagggataaattctctgaacttagccaccagaaagcctctaactaataaacacactaaagaaaaagttttaagcctaagcacaatggatttaaacatccattatttctgttttaaaataaaactaggcagagaagagtcttattatgcaagaagtaaaagaaagcaagttgaacacaaaagaaagcatctgtatactaacgctttaagaattcaagattggatccactcagcacccagcaaagggccatttagcaactgctgggaaaatgactgacaaagacagacaatctggaaaattgaggggtatattaccacatgggtaaaggcaatctttcttataaccagaataaaatagtataaaatacaataaaaaaaaaccctacgtgcttcaatggtaatgagtaagctgtcctgaccttcttagggaatgactattgtcaaatgacctccagatggaagatttatttttaatcaccattttctcctttctgttgaagattttgagataaatcaaaacattaataaacgtaaagaaaaattactgtatccataaggaaatgaagctcacagcaatatggcatctcagggcacctagacatttaataaaaactgttctctgaagcagaggtcttaaaactggggtacctggaaatgcaaagcatttctggggatatgaggacatggcttttttttttaaagggaaatcagtattcagttcctctacatccatatgtgttttttgctgaaattgatattctgggaatgcctgtgatggagagacctgttctccattcataccttccctttcacgtatccttctcttttacctattctgaatcttaaccatcatagtccattgctccagagtgtgaaaactctgtagcatcatatacaagaagaataattctaaacatgaatgattcactaggggaaaaaatccttttgcaagtcaggtagttgccaagttttgctttaaataaattttggcaggtgctgatgtcagctggtagttcattgaagaaaacgttttgatgattggccattatgtaattttttttggtatataacttaaacttgaaagaattgagtaatactgctagacaagttatttatttccatacacttatttataagaacaggttttcttagtatttacattgatgataagagcaaaaaactgagttagaattgatgcttgactctcccattctagtaataggtagcactcatccacaggtctataaacaaattggaaaaacaccccattatctgtttcagtaagagctgatttctgataggtttttataggcaaaaattacactgaaatttctagtacatttatgttcttttgatcaattatgcactagtaataattgtaataaaagctcagattttaaaaaatactttgaatcttttcatcttagaaatttttagaaactaaaaagttttaaatttataattttattacagaaatatacagtgattataacagaatttcaaaccaattttattaagatacattaggataaaattttggagggaagagaatggaaatataagtcgatgaaaaggaagaaacaattacaattctcaactcacattgaagagcttgctcattttttacaaaatggatgatggtggatatcaaatagttacggcatttagattccacttgactcagtcacaagagttatgtaagagttttattataaaatgtccaaacttacaacacattagaattttcattctttatcactatataaactcatgatgaaaaatgtcagatttcagtgaaaaaatgtgacagctatacattttaatattttttttaaaagtacatgagcaaaaacattttaaagatcattggtccaaagtgaactttagaactgacacaatagttctgtctccctttgtgttcagatcatttttgaaacataaatctagggtattaaagataatcacctctgacatttattgagtatttataaaggtagaacctgtgttagccagctgctttatatctaatccttataactgctctgcaagggaagcgatacatcttcaatttacaatgaagaaaaccaaggcccatagaatgcaaatcttatgacaacagaggtagcagagctggggtttgagcccgggtctaactgtcaccagttccccatgctctctctatcatccctgttgattctgtcctcatagaaggcttgtctggtctaatgattcagaaaaaggagaacaaatccatccacattctaataacaacaaagctgaaggccaaattctgatcagcccagaaattatcatccccaggactccctccttgaccacccctcttcccacaaaggacagagttagcccttccctcttttatacagttcccatcccgacacagggcaacacttccccggccatgctgggctgtaatttatttacacgtgtttctgcccagtgagattgtgggctacttggggaaaaattgtgcttcattaatttttctgtctttacagcttcccgtgaggtgtttggggcttaaatagatgctgcataggaccttagccattgcatctgagccatctctcatgatttaacactgggtctcaaccctggatacctagcaggataaagaattctaatttccaggatgcacaccagagagttaaatcagagattctggggtggggtgcaggtatcgtcacattttaaggcttttcgaatggcttcaatgtacagccaaggctgaggaccactgactggtgtagagtggacaaggtagcacgtgatttgaactgtcttctcatcactaagcaactgctctacacttgaaaatacctgtcagattgggtttcagttctaactttgtcttctcataccataactagtacatcatggagaaatgctgccttggtttctgatatctgtctcattctgtgatagacacttccataaaatggcaatccatatttccaggaaatgtacacattcagtttctgtactgtcttgatagcagacagaccatgctttttattagagaacatttcaggttttcagagacccatatccctactggccccaaggaaaagatgtcaccttggctttgagcagactagggagaccaggatacaggagctggagaagtgctacaacttgagcttgtgtgggcctgtgtgtgtgtgtgtgtgtgcgcacatacatgcgtgtgtgtttttgtgtgtgtgtacaagtagttgtgctggggtgggtggtcaaaggcagaggaaatgagcagcaccatctctttcagaggctgaaggacagaacaggcaggcaggcttgaggacaagctgtctgtgggaagctttccttcaaggccatcctgaaaagagttttatgcatctctcaagctgttctacctcatggatcacctcataatgacctggtagcaatgactgtacaaggcaaaaagaaaactcttggctgccagaagctgggaggaatttctaaggctcatggggattagaaacctctgtgtcactgcaggagggggaacaatgccttctgtcagtttttattcaagtgtttcattttgagccccaaccacactgactttgatgtgagaataaattaattccagagccccgacttgaaatttcctgactctgcctgtctattgtctatccacccacacaaaagagaaacagcggaaccttgtcagttttcaagtgagcagcttgcaatacacattcttctagggagctttttaaaaggagcattggagtttttcaatcctccttcttcttccttaagtatttgcccattttaatgttgagctgctttctttatatggaaaaaagaattgctccactgagctgtagaaatttgattttcttggtcagttggggtcaatcttactctattaaaaattttaaaacaatcacttatgatgattcttcatgtaactcttaaggtttcatatcttatatcttatttttatattgaatctgcatttttgagggaacaaaaaatgctccccagactttgtctggctcacaaagggataaaagctttacaagatatacatgccactctgactatagtctctgcattttgcatgtgaggcgatcaggaaatggagacgttcagcagcttcttccagatcatccactaaatctgctgcagaactataatgagggctctgaggcttactatcttcatttctagaaaacccatcagtcttctgtttgtaatttattatgagactgctttcttccccgcagattcagagttaactttttaattaagcatctactgtttgacatttgtgttaagtgcatttacctactttatcttttgcaagcatttcaagattgaaaacttgagaatcctgaagatactctcccccttcttgtctctcaatatgtgcacacattattttactagattactaatgtgtgtatgcatctgtgtgtgtggtataaagaaggaagaaaattcttgtttttgtgtcttggggacgtttggagaagtttccaatgtagtggatgcaattggccagtcttttctctccctggtggaaatcttcatatgatataaacctctctaggaaccccctcacccactgcctgcattggggcttgaagaaatcagtgttgaaattcaagttatcttcatagtcaatacctcaagattaagtataagaggtgtttttccaaaaagataatttaaaataactattgacttttttcctggatgtacaggagaggaattatcagcaagggcctgagtgtttaaagctctttgattttactggacctgctcattcattccccaactggctttgtactacatttgagttactggtgatgaccaagctgaatccagagacacaggcaggcaggagattgactgcacctttcccattgccctgtcctattagtttccctgtacattctagtccttaaaatgtgtcagttcccatggtgtggaggataacaggtttttagtatgattatcaccaattatgacactagaaagaacagaaatcatgctgtcttacaaaattcctctgaaacctaaaggatggagttactttctttattttcctggtttgaaaggtcaatttgttgctgctcattactaactagccttggtttacaatcacaccagggagttaactgagatttacacatatttatatttacattggtttcatttcaaaaagctttccttatgcatgcacctaaattcctttacttcattctaaaactactggaaaggcagaatacattcagtttaacgtaatttatgcaagatactccttacagggaattttcttggtaggaaaggccaatatttatcatcaagtaagaataaatagaacattgatttgatcttaaaatcatgttttctatatacatacatgcaaacatacacatgcacctggctacatacatgtgccacaccctctgctgaagttaccaatagcttttgaggtcagtgaagcatagtgattacaggctaagctgtggagtgggtagacctgggctcaagtcctgcctctggctacgtgatagtgtacaaattacttaacctcctgtacagtattcccttcttttaaggaatacatactatataagggttaatgtgaggatcagatgtaataatgtctaatagacctgtgcttctacgactctaaagtatacacaaatcatctggggatcttgttaaatgcagattcaaattcagtaggttaagaatgctgctagtgcataagcaattttgagtagcaaggcacaggctaagacttcacaaaatggaaaccaaaattgctatccaatcgtcttgcaagtcaattgagagaagaaggctgagaaaggatttgtttggtgaccagcgtgagcaaggtacaaacttagtttttctagtacagagggaatgaaacttttgaagtcactacataaggagctactagacttaatttccactttctgcccaggatcagccaaagaccgtctgaacccacatgagagatgataaggctccaaatgtcctgaagcctcttacctgtcatagtcttggcaaatctcccccacagctaccaaagctttcagatactcattgggttggtaagggtggatgtagtgcaaggaacagctgttcctggggtccccgtttgaggcagtgaaatctatagctacctaaaagagaaaaatacaagaaaaggtaaatttaaagtggatgcatctcctaagaattgtgatcagtcatgagagagacctggcctcgggtcaaaaacagtagcacattacataccctgccaataaagaaagagaataaactaatttgcttgaaaaactagttattaatttggttgaggccatttctgcagtcttcagtctcccttcccaccagtgcactctcttctctctgtttaataggaacttgagattgacatagatcagaaagcccagatgctgttgatccatctcaccaggcagcaagagtaaggatagaatatctgccctccaatttcacagttcactaagaaaagacttctacactccctgggcagaacaattccatctacgcggcataggtaagatcccttaaaaccaaattctgtgttaaagatacagtcttcataccaaagccattgtcatgtttccatgagtggccagatgcagagagatgtgttagagtggttataacaaattttctggaaggagcagctccatgtaaggcattcaatattttggttctcgttcatgtaagaactcctgcctacaacaaaggggatgcctgaatgttatcgcattgtgagtgggaagtggagaagggaaacctgtcttgccaccaactagtcatttatgcttcaacttctcaaatttcttctgacccccagtatcataatcatgtaagtaaacgttgagtcactgaacacttcttaataacaaaagaaagaacaaaaaatgcttaagccgagggtgttaaaatgagaagaaacacttcttctaatttccaacatcaccaccatctaaataaaagttaacccagcaaaaatctctttaaaaatgccacttaagcttcgagggaagaaggttaaaataaaagtcatacgggaagaaagaaatgtttatgttgcataattccatttccttctggggtagagtagaatacattcattggcttactatgcccgaaaggctctattttttcatatgatcttgggaatcataatgggaaatgttatttgtgttatatttggtaaatttcattacaacaaataactggaatgcaccattggttctaggaaggtgcaacattatttctgaaagggtagagaacacatgccacgtgtgtgtttgtgtttcttaaggtataagttgatggggaaaaaaatgttagtcacatctgatattgtaccctgcaatcaaatcaaagtgactaggaaagaaaagcaataggctaacattaattcatttataggcttttttcttttctttcatgaaattacgtgttcatctgtgttatgtttttctttttcttccttgcctctccaaagaactacgtcaaaaataaacttaggattcaaactctgttttcagaatacccagatttcttaaaatcaggggatgcctactgataaatgctagtactaagagtatgtaaaaaaaaaaaaaaaaaggttatctgaagaaaaattgcagttcttccctgaaccttagattcccttactttggataacaaaggaaagaagagagaaataatctctgtgtcaggcactgtgctaactgtgtgtgacacagagggcatgatattacttcatttatatgcatgatattactccattttcatgtgacatagggtaacagggcttggagttgggtttaaatccaagtctatatggttcctttctacctttttccattacgccatcatacatccaggagaacatgtatgtctatgaccaaaacaccaggacttctcatgggtataattattccaatataaaatgcaggagatttggcctggaggtagggagacttgctaggaggcaaccatggcaatttggggaagaattgcctggaataaactcttcgtgaccaaaatgggtgtaaaacttaagaaaaggaaaactgaaatgtgtgtgtatgtatgtttgcacacacaatagtgagatgattgttactgaggatgagtggaggtaacctagggagaccaataaagtccagtgtcttctgggacaggtttatcctgaaggtgagagccaacccaccaggaaaaaaaaaaaaaagtaagaccataggtgaggcccttttaatcaaggactacgatgaaaagctggtgggagagaggaacctacatgcattttctgaacaagaaggaggtgaagagcacctcaggatccaccaatgaggcctcaacaagatagagatccaaactcatgcagataattccaggaaaatttctgagaggagcactccagagatgtttgagagacaatgtttgagaaaatcatatctttggggccctcctgggtttaccaagctcaactcacagacaccattctcagccttttactcctaatgggacatgtttaagggataatggcaccttgcacaggtgtacatagtgtttaaaaggtaaaagtaatgctgggaaggccagatgtaaagccacccctttctcttccactgaggaaagcatgttagtactccagggaattctagagagcgtgaagatgttgttatggagattaccttgattctgctttaatttatctaaaaagtgaatcattggcaggtgttgctactttattattaataacaaacaccttgtggcccacctcacttctattcatgatgccttccatcatgggtcaccacctccttacctctgaaggcatcatgcttctgcctcttgatactaaagctaacaatctgtcccatgtgctggttgtctgactgaaactcctgaagtgttaagggtgttctgtgatgacaaaaacatgctggtgtcttgatataaaactagacaatgcaatcgggttatataggccagaggaaaaaaatccataaagaaaaatggctgctcaagaaacattcctaggcattggcaaaattctcctagcatgcaggcacctagtggcagcatctgagccagagtatatcacctggatgaatatgttatatctagataagtgtgtgtaatgtctggacaagcatacatagattgtggcaacaatatattttaaaataatagaaaaaaacatatcagagctggagatggggtgaggcaaaaagaagtgcctagtttgtaaaacccaaggaggcactcactctcagcagaccctatacttgcaaaatccgcagagtgagagtctccttaaattttgcaccccaggtacgtctcttgctttacctccaatactgaccctactatgtcattttcattcctatcaactcttcattgtcaggcttggaataattttcttatgcttaactagggtggggcaaagatgatggtgagaaggaaagagtgattgaagaaagtaaggatagaaaatgaataggattttgtgaccacttgaatgcagagttggatgtcagttagggaaagggaatggccaggttttgaggggacagaagagaataatatattttgaagataatgaaacaaggtacaggctaatgctagaaggttagtattgggctgcctgttcttggtgctactatttaaacattcaaacatgcctggtggaaattttactattatttcttttcagtcaggcctctagggtttccacttttcccatggcaatggcccctacgtctatgacaacgagagaggccacttcatctcaggagattctcatatcgacctaggggagggtatgaacttaaaaattaactgatgaaaaaggaaataggcttatgattcttaccatatagcccattttatagttctcatggtttaataaaaaaattttatcatgtgactagacagcaatggacagtcttaagtaagagtcagctaaaatattttcatttttattttctggaaagtagtggttcctaaaacctcatttatgaagctggagataaaatatctatcttcagggggtggtcttccaccaagaattctctgtgctctttaaagttagcattagtagaaagagagcagagtgaaaggttaggtttattttagaaagcaacagggaggcagtgaaagatgggattaagttgagaaataaaagcaagaaaatgactgaaaaatgtcagtgtgtggaggtggctactgatgcctggttttctgaataccggtgagctcgcagagccaccacgttttcatttcctgataggaagcatttatggaaacctgtggttctggtatgtgctccaatcttctctgcaggcagcacaagaacaggtgcccagtgctttttccttctgcccaggaagccactgctcattattaagcagagctgtggagcagctttgcaaaccttgtaaagtaagaatgcaaaatgccccctccatgacaccaagtccccagtgtgtggagctgttcctgggaaaaggctggttgcaaatgatgagcatctttctttgggcatttttagattcttacatgaaacaaccccactcctcagatcccttcccttcatctgccaaacaggtcatttgtgaaccttctcgacgttttctaagggaagctgctgtgtaacaacctctggttagttgtacctgcagtctacctttgggaccacattcttggggagctttctttcttttctttttaaatagctgtgtacaatttggacctatacaatgaaccttgtaggtgaacatactgtttggtctggaccatttcttaaataatgttacatttttattcttttctattttcagaaaactttctaagagggcagttaaataggaaagtagggaaagtcacctaaacttacttggttcattttctggaaatggcaaagcatttgcctctttaacccattgtaccctggctttgcataggaattcagtaagcagggctcactaagcagtaagcagactcgaaggtctacaccagagtagatcagtgttcaatctgggatgtaaaataaagatttaaaaatgtaaactgggccacagtgtggacataggatgccctaaatgttttagggttagaaaagatttcctgagactgggtgcggtggctcacacttataatcccagtgctttgggaggctgagatgaaagtataacttgaggccaggagtttgagaccagcttgggcaacacagctggaccctgtctctacaaaaatttgttttaaaaagtagccagtgtggtagcatatggttgtagtcccagctactcaggaggctgaggcaagagcatcacttgagctcaggagtttaaggttacagtgagcttccagtgtgctactgcactgcactccgggaaacagagtgagaccctgtttcaaaaaacaaaaaaaacaaaaaaaaacaaaaaaaaaaagaagaaaggaagaaagaaagaaagagagaaagaaagaaagaaaaagatttcctgagagaacctttaatgagtgatctaaatttttaggtttgaaggtcagtctgggagaagttgcattcagcagcttattatattactaaaatataaactatagtcagaggtaagagaaagcaatattatcttcaatttttaaaaatgacacaaaagaaatgtccgtttaaaattaataagaaaaaaatatcactcgccatgccactaggctggtaagtcatattttatttttctttcctctctaggtattttatatatatatagttgtaatcatagagtaactctgctttacgtttttgtaacactatgtcataaacatgacctcatgttattatctaaaccttagaattataatttaaataggctttatcatagtcaatactaaataactaaatactatgataataaatatcatagtatttaaaggaatactgtaattcatgtagccattaccttattgttagacatttaggttgctgacagagtgcctgtgtaaaaatctgtgttacaatgaacatttttgagcatatgaaaaagcaataaccttcaaaaaaacctttgatttttctaccattttctctttttatttatttatttatttatttatttttttaaaattttttattatactctaagttttagggtacatgtgcacattgtgcaggttagttacatatgtatacatgtgccatgctggtgcgctgcacccactaacgtgtcatctagcattaggtatatctcccccattttttcttttcaaatactgtacggcatctgtctattttgtgttatctataactttgtattttgtgtgtgaaattctagtatctggttttatttttagctgctctaccatgtgccaaacccaatctctcaccctgtggtctgtttcacctccacccacctcctcaaagactgcaatactagttgctctagagttcttatgacttaaggattcatgtgaggtacaaggactgtcttcaggagtgcccttgacctcccaaaattgcatgcaaaactggatgtgtgcacttcccagtaagaggctatagatcatgtatcaaattctcaagtgttcaggtgaccaaaaaagaataagaatcattgactgtctagggctctttttagcatcatttatctctttccttccactgggctgttacctctgcttatagtctgattctagcttaaaatctcttctcttttaatctttaaattgccatcctccttgtacctcttgccttcccttcactgttaacttcttgaatgaatacttacacctgctgtgttcacttctttaccttctgtttacactctaactcctgggtctcacctatctcgttatgctgaagttgctcttttgaagatgatatacacctacctactcatcatgttgttcttcaccctctgacttctctttagcatgcaagattgttgcccttgatcttaaccttagctttttcctcctgggcatctgagttactgcctccccttgggccttcttctcctctggcatttcttctcttaactctttgcccctctttcctctgctgccagatagaggtcctctacaattccttgtcatcaggccccttttccttctatatttttctcttgggacatctcatccaaagccacatacatgtagctcctgactctcccctgaaacctaggtccatatttataagtaccatctccactgggatacctgaaagtacctctgacgtgtccaaagccaaattcatcatcttgcctacagctgctgttgcctcgcgtatttccctgaccaggtccactatgctctgtcagtcaggcacaaaagctttgattgctttcagtcttctcattgtattctaggcagaggcttagtgcttctctttccacagtacctctcctgctgctgccacccttgtttagcttctttttacctggtaccaggcctgtggcagtgggcttccatctctgcttgcttcatctctcgttcccccatcaccaccatcaaacacccaggtttacttgtcgaaagcatgtgcctgttgcttcaaggccctcgtcaatatcctttggaacatgcattatccaccaaattacctcaaaattcaaagcccttcaagttctgaccccaaactgcttccccaatactcccctaaatacatcctgtttattcattttcctaattaaggttttagtatttataattagaatatagtggtacataaatacttaagtttatgggggatgctttttaaagcaaaaccccaatatcatgtttatttatccaatttgttcttttttctaaatctaacctccctttgaaggtttagggttcaattattacaattcagcaaaagtattttgagcagcttagcagctgaggagaaagatgcccccatctttaacactcttaagattgaaccagaagcaccagcatctatggaagatacaaaggctttctcctagcccctgcttatattttgtattggtcagagccactacaggaaacaaaaagtccactcaaaaggtgattgaggaagtttaataaagggacaattcacaaacatgtggaaaaggttaatggaaactgaccagaaagagtgggagggagcagttactagaattcagtaagaggagtatcttcaggacagggcacctgacaggaactgtgaccttctgtcaggaagaaggtcgctgcccaaccacagcctagcaggcaggcagctagagaaataaatatttcaagttctctcgcctcctattctttgatctctgatggctgcctctcgttggtcaaatccaaccaaaagctaagagctggagagcttgggtggtgcatccaaggaggcttgcttcctggggcacagaagggagagtggagaaggatggaaagtggctctaggggaggaaatggagaacatccagaactttatgtcacctctggtgcttgaaggcctttctccagggagacaaaaagtttgtgttggctaaagctccctggttgctcaggagccaagggtcacataatgtgccaatgggggtttttgcctctgaaagcctctgaggtataattactgcaatgaaacatcccttttctctctctcctctgcccacctccatgccaggaaaccttcctctcttcacttctcatctctctgccacttccttttcatgttgccagatggtttcagtaaaataaccaggcagataataaacacttacagaccaaattaaataagacacgatactttttcttaacgatttgcattacagcttataatttaaattaagttgcaccacttgagcaataaaacatttagaatgagaaagctgacttcattttggaagaaaatgacatagaagtgactggtatgtttcctttagtagaacactgggaatagaatacctagcaattctcttctgagtccccaacctgaaaccctacaggaggaagggctgtggggaggaactattgttggctgcccccttctcctcagcattcatctgtacattctcctcttctcattccttgctccagactgctctcctcactcacacctcccacaggtctatcagttgacactggagggcatggggagctgcaactggggtgttgttggtgacaaacactgaagtggtactctcagtgggggaaggtcagcagactgagaaaggaggggagaacaatgcagggcacagggatatctgaaagtcaggatgtggagctgggaacactttaggttggggttcagcacctaatttttgttggggctgattctttgcagcacaatttgaagggcagagcaagcccctgaaggttgaatacagagttgttcaagagcatgggatctacaaaatctaaaccagactgaaatcaatagagctttcccttgaaaagctataaatagtttcctgaaatcacgtttttgcctaagatcttgggaaactatttccagtagctctcctttatgacattgcttgcttccatacttccatatgggtatgctcagagcagcaatgagcccacaggacagctagagttagatgtgtatcctcagcgaacatgcttgctaccttctgtatgtgacagtgtgaatgtaggaaggcttgctggctgtgcattagagaatcttagactttaaagaggagaccaaactctaaaatttgctcctgtaagcgttcagaaataaatgcacaataccccaagtttaggaaggacataggtatacctccctgagattagggcagaggatacttccctagctaaggagaagctagtttagtaaatgaccatttatctcatcctttgagactccttttagtcctttgagcaccatcttccttggttccaggaatatataggtcccgtctactctcttgggcccaaagcttgactaaaaatttaaacccattttatttccttttttcaaatgactgagccagtcagggagctgaacagggctgagcttcgttagtacatttctgtaagatgagaaataaatgctgtacaagttacatctctcttgtttacgtccacattgctttccaaagggttctagcacatctgtcttttgccatctggggattctttttctggaagtcacatctgaccaaacctaggagaattttgaatattaagtcagtgaaagtcagttgttccagtgcagatggacttacaaccttgacctacctaggcactttaaaaagactcagcctacccagtcaaatatacatcaggggtgtgtaaatcccaagggcacacaaattacatacaggggatgatccttgatccattcactgagtctagacacccactctacttctcaaccttgacctcggcctggttctccaatctttggaattcatcttttcattgcctaatgaactgtttgtatggcttactcttggtcccgactactgggtatgacattggtgctgtggtctagtcacatgaacacaaccatggcatctgccttggctcagtggaacttacttgcttggcttacttcctttcaatttttctcaccaggtgatggaatctgacaggctactctgcttcatgcctcacatagttactgaagaaatgggaagcgttaggaggatttcctagaccacctgaggttgagtggcataaatttcctgatatgatgctgaaaactatacttattaaagaaaacagaagtgtgaacacatttcaaaaacacgataccatacgcttcaacaatgagacttgaacaaagctgcctgaaggttttaataagcttttgtctctttatcccccaaacccagtgccacccctcatctcttgattcctgaataagaatcaaggaatcaacatgaaaacaacttactgtaaactggatttggcagccacccatgatgtagtccaagaaagaatgcatcttgtgaatctgcataggaggggagaggaaactgggttaataacagcacagtctatttcctgatatattggaggcctaaaggttggtgactgataagctgctaaaccagaggaaagggcagacagacatcattgaaaaaagatgggtcagttaagtttgttctgttaaaggagagaaggaaagcaatattaatacagatgggcctatgaatgctgccaatatccatccattgctcccctctattatggtttatgcaaattttaatcagcttatgcctctgaagtgagactaaaactatattttcaagtgtcactactgttttgaaatcaatgatgtctcacacttgacttcagtcttgcctccctgtgtctaagtcccagtcctggtgacattcttaatatgcaggtaatttagataggcagttttaaaataccattggctgagaaggtaatttactgacaatttccagttagttaaatgcttcccctgccatgaacaacaatgactaacatttattgggcattactgaatgacaggtacttaacatcttttacctcatttaattctcagaacaatcctatgaaggtggcacaactattattattgtaccctgtttatagatgaggaaattaaggtcaagatcacaatgctaataaatggtagagttgagactcaaatgatgcaagtctgggttacatactctgtccttttgacctctactctggaagtcagtatggttgttgcgttatgccaactgccatcatgtgttctcaagtaccttagggatttctggtcttaatttacatttctttgtgattttgctgcttggcttggctcttggtgatattcatgtattcgtttattcaacaattatttattgaatactcactatgcactagattctaggactacagtgattagaaaaacacatacagtacttacagtctggatccttctacctggacagccagtaactgtaatttttgactgtcacttctcagattccatctaatgctcaggaagcttcttagagagacccaaaaaatcagtgttggtctctctagataccacctccaggtggcacacatctattggcatacttttcttagaattgatgttcacttggcctctaaatagtgcttacttttggtgtcctgatggtaatgctttgcctgatagttgggacactgtgctactgtgtctgcatatcaaagaaataagaacttgaaagtgagcaaaataacagtgcttctgagcactgaactctaagagcaactcatggaagaaaaaaaaaattgtgtgtacacagtcaccttaaggagaaagataaccattgaatctagatcttttctcctgcttctttgagcacaaggatagtcacataactgtttagaatgtacccaggatttgatttgtacagttatgataagatgcctgacatggagacagatgtctgtatctgtaagaagagtttattgctcacagttcttcaaaggataggaggcatgttatgccacaaaggaaggtcacatggggaagcaccaggataggtcaggaagcaaaagcaatgaagggaaagcatgggcaaaccatttactgtgtgtttttttttcataggcaggagtgggcaaggcagggtaagcagctaagcaggcctaggattggatagtttgaacgatttcagcaggttttgaaatctatcaaaaccatgtgagtggtttctagttatgtgagacctgaccctaggggcatataaggtgggagaacattggcttggtgtgtgagagtttggtaagggaggtgattgggggtttgaactaaaaaatgattggtttgtatatcaaaggcatgctaaaaggcaggttgtttgctgtctataggaattagctaacactgggagagtagtccctcttaggttcataaggcccaaagttgtcaaagcatcaaaaaatattgaaaaaaaaagattaatacaatggccagtcataagacattatcccctagtcccagcaattggtgtaaagggtagggatatgacccaaagcagaccaattactcttttccttcactatcttgttatgtaaggatatggtcctgtatatatacatattaggttccttctaatatgttaggaaacatatatctatgtatgtatacacacacataaacacacacatacacacacgtatacatatatacaatcatgtgtcatttaatgatggaaatacattctgagaaatacactgttaggtgattttatcattgcgtgaacatcatagagtatacttacacaaacctaggtggtatatcccactatacacctaggctatgtggtatagcctattgttcctaggccacaagcctgtacatcatgttattgtactgaatattgtaagcaactgtaacacaactgtaagtctttgtgtatctaaacatatctaaacataaaaaggcacagtaaaaatatggtataaaatataataaatggcacacctgtatagagaagttaccatgaatggagcctgcaggactagaagttgctctgagtgagtcagtgagtgagaggtgagtgaatgtgaaggcctagactattactatacactgctgtagaccttataaacacttaagctacactgaatttgtttaaaaaataaagtaattgcattacaatggctatgagtcactaggtgataggaatttttcacctccattataatcttatgggagtactgtcatatcggtggtccatcattgacaaaatgttattatgcagagcatgactgtatatatacataaatacatgtatatacaactgctcctggacttacagtggggttacatgctaataagcccttcataagttcaaaaaattataagttgagtcatcgtaaattggggaccatctgggtgtgtgtatacacacacacacatatatgtataggtgtatcttcttttattgtacctcactttattgagctttatattttttacagattgaaggtttctgacaacattgcattgagcaatactattggtgccattttcccaacagtatgtgctcgctttgtgtctgtcacattttggtaattgtaatatttccaactttttcattattattgtatctattatggtgatctgtgatcagttatctttgatgttactgttgtaattattttggggtgctatgaaccaagcccacataagatggtgaacttaattgataagtgttgtgtgtgttctcactgctccaccaactggccattccttcatgtctctccctctccttgggtctccctatcccctgagacactactctattgaaatgaggccagttaataaccctacaatggcctctaagtgttcaagtgaaaggaagagtcatgcatctcttacttaaaattaaaagctagaaatgattaaacttagtgaggaaggcatgtcagtagctgaggtaggccaaaagttaggcctcttgcaccaaacagccaagttgtgaatgcaaagtaaaagttcttgaaattaaaacagtgaatatacaaatgataaggaagtgaaataggcttactgcttatgtgaaggaagttttagtggtttagataaaagatcaaaccagatacaacattcccttaagctaaaacctaatctagagcaaagccctaactcacttcaattctatgaaggctgagagaggtgaggaagatgcagaagaaaagtttgaagctagcagaggaggttggttcatgaggtttaaggaaagaaactgtctctgtaacataaaagtgtaaggtaaagcagcaaatgctgatggaaaagctgccacaatttatccagaagatccagctaaaatcatttgaggaaggttactacactaaacaacggattttcattgtagaacaaggaagaagaagatgccatcaggactttcctggctagagagaagaagtcactgcctggcttcaaatcttcaaagggcaggcttactttcttattaggggccattgcagctggtgactttaagtggaagccaatgttcatttaccatttcaaaaattctagcactcttaacaattatgctatatctactctgcccatgctctacaaatggaagagcaaagcctggatggcatcacatctgtttacagcatgatttactgaatattttgagtctactcagaaaaaaagattcctttcaaaatgttacagttcattgacaatagacctagtcacccaaaagctctgatggagatgtgcaaggggttttatcgttgttttcatgactgctaacacaatatcctattctgcaccccatgaatctaggggtaatttcaactttcaagtcttcttatttaagaaatacatttcataaggttataactatcattacggtagtttttctgatagatctcagaaaagtaaattgaaaactttctggaaaagattcatgattctagatgccattaagaacattcatgagtcatgggaggaggttgaaatatcaacactaataggagtttggaagaagtagattttaaccctctaggatgaccttgaggagttcaaaacttcactggtgggacaaactggagatgtggtagaaatagcaagggaaccggaattataagtggagcctgaagatgtggctgaattgccacaactgataaaacttgaatggatgaggagttaattctcatggataaacaaagaaagtggtttcttgaatctgctcctggtgaagatgctgtgaacactgttgaaatgacaagaaataatttagaatattccctaaatttagttgataaagcagaggcagggtgtgagaggattaactccatttttgaaagaagttctgccatgggcaaaatgctatcagacagcatcacatgctacagagaaatctttcattaaaggaggagtcaattaatgagaaacttcattgttgtcttatttttaaaagttacctcagccaccccaactttcagcaattaccaccatgatcagtcagcaaccatcaatatccagataaggtcctccaccagcaaaaagattatgacttactcaaggctcatatgactgttgcattttttagcaataaggtatttttaaattaaagtacgtacatttttagacataatgctattgtatacttaatagactacagtatagtgtaaacataacttttatatgcactgggaaatgaaagaatgtgtatgacttgctttattgcattggtttggaatagaacccaaaatatccctgacattggcctctatacatatacatatacatatacatatacatatacatatacatatacatatacatatacatatacatatacacatatatgtatgcctgtatacacacacacacgcacacacacacacaacatgcacacacaacaatcatctggatagcaattgagtcctgtatggaggagtcagagacacgtgggttaaaatctcagctcttaaatttactacttgtgtgactctgagctaggtacataacctcaattgaaagtagacatctcagggttgtggtaagaattaaacagagtttattatagttatttttgcatagtaagtactcaactagtgtcagcatcactcccagatttgagttaagaagtttaattattagcacatgtgattctctgcaaagttgtagcccctctggaaggaattcgtaagccctttaatctttgcctgttgtcttgtttttatggtacgctttcagtatgaataaggtaccacatataaaacactggacaggctgggcacggtgggtcatgcctgtaatcccagcactttgggaggctgaggcaggcggatcatgaggtcaggagatcaagaccatcctggctaacatggtgaaaccccatctctactaaaaatagaaaaaattagctgggcgtggtggcgggcacctgtagtcccagctagttgggaggctgaggcagaagaatcacttgaacctgggtggcagaggttgcagtgagccgatatcgcaccactgcactccagcctgggtgacagagcaaaactctgtcccaaaacaaagcaaacaaacaaaaccaaaaccaaaccaaaccaaacaaaacaaccactggacaccgtgaagggcacatagtaggtgttctagaaatgttggcttccccatttggagatctccctctagcactgctctgggcagagatgatcctaacctatcagcggaactctcctgtctttggggcaggactgtccctggggagaggacagtgacactgcgctgccacagctccatgaccacccatgcttacatttctcattttatgttctttaatacatgactttttaatttttattttaaaagatcacatctttttgatactcttttcctctgaccacaccacctgaactcttcctctcagatagccctagcttcatactcctggaagagagggttgtgtacataccttgcacagattcagaatcacagtgcctgagttcttgtaattcttcttcttggctttgtacttgggattgatgcactcccactgcacctgaaagaagggtcatagcatgagaatctgttcaggaaaaagctgagtctttcaataaggccaagctcctaggtgctgctgaggacaaactgaactggagggctgacaaatagtctctaggtggtaactcttgcatctagaggagcaatagggggagtggttgagagtgatactcactgtcagacttctaggtttgaaccccagcaactccgcttccctgcttatgtgacttttggcaagttacttgattgctctatgtcttgaatgtcttctctgcaaaatggagcttataattatactctatctcataggattattgtgaagactgattaatccttgtaataaatttagaacagggcctggcacatgtcaatgcttactattaatatggtcaaataaagcagtacagggaagaagaaatctgcaggaacacagttgagtgatgaccaagtactaaggcttactgcctgagaattgactcaaaaggttaggaatagtgaatgctggctagagaaatttactagggacaataataaattaacatagaacttcatggagaactaaaataatggattggcttatgtcccaaaagtgacacagtagatctccaaaggggcctttttgaaggataagatcagagctacaggagtggctgggaattaaggagtcagctgggaactaaggggaataggtctccagcctacagaagatttaatgggacaaaaccaattgtgaatcaaatatccaagagttgttgaatgttcctgcccaccaacctatgaaagctgaatctctggatttctactcaagagacaaaatttcactacctgagaattagaagtgtctgaaaatgaagtagtttctgaggcaggtgcaaatggataggctgatatagcagtggcctcccataatctattcctctcagtgtccatgcatttgtgtagctccctcccacaatgatgaggcatttagtcacatgactcattttggccaatgggacattaggaaatgtgatataagcagaggcttgaaaagcgcctgtgtattggggctggctcctctcttgcttctgggaagttttcagggccatattaaaaagcctacaatggtctccaggaggataaaagtatacctggagaaatatcctggccatcctggctgctgaggcacaaatgcacgagtgagttctgttggcaccacgtggagcactatgtgaagcagagaagaattcagccaatactgccaacctagcgaatgttgagtacatagtgattgttgttttcagccaggaagttctgggctaattttttcactcagcaacagataactgatactgtagtttctcatcactggaaggtgccagcaggactgggcaactacataggatttggaagagggagatcttataccagtgaagagtcctctatgactccttcaaaatatggaattcttgggtgaaagaaagaaagaagaaaacattcaaagcagaatctaaaatcagacccctagccttgtttttgtcatttaaaggcctaatctcctaatctgtccataatgaatgttgtctttctttcctccctcagattttcttctcatttactctccaagtgggtagaacttgataaacaagaattatagtccatctcaaagtagatttagtatttctggacaaaagagcccaagttcctcccaaacctatcaaaactgatattgtcttttgccccaaagcttcctctaatatttcagtaaaacaggtggtttagggatttaccaaacagttggaaagaaaagacactaaaattagctgtgccattttttgtcattctcaatgatttctattaatctcaatttcttctatcaagcaggatatattgagttaaagattttgaattctattaaaaattatagtgatcatccatgaaaagtctactcacttccttctcaggctaagatgagcaagtatgggttggcttagtcaggagagggctccaaggaagttgaatcaaacccgtagatacttggggtccttgtacttgtgaggtgggtagggggtcctgatggaccagatctaaatagtttgcatctgtcttgggatgaagttggcatataactatgggctatgcactttactttcccaatcccatttaactctccccacagcccactttgacagatggaagatgaggctcagagaagagaaagaactttcccaggtcatacaggtagtaactggtagacctgggattcacacccacatcagtctcattccaaagcctgcactattaaccacaatgccttcttctagaaggtcttggagtagctctcctattcttgcaagtatcccctttggccaccccaaactaaggatacttataaatgttattcaagaattaatcaaggttaattaagaatttaccctgtacctatagaatcataactcccacaggaaaaggaaagttgaaagatgttctctcctctttttttctctgatgctacatactgagattcctcagggttcgagcctcctgtaccttctcttcagtcccctctccctaggtgtactcatccattctcttgattttaaatgtcctctcttagttgatggctcctaaaatatatttacgggtaaacctctcctctgagtaccagtttttgaaaccaaattttgaaaacttcctcataaactggacctcgctaccacaattcttccttacctcaggaaatggcacaatttaataatctatccttgagtcaaccatttcctccttcccttactccctatatccaagccttcaacaaaccttgtagctcatatctccaaaatatgtcttaagtctctccaatttatctatctctatgactagttccttaacccaagtcattatcacctcttatctatagtggtagcctcctaacagatctcccttgtctctctttaattatctacacagtagcaaaagtaatattttaaaaaattaaaaccaatcatgtcattctctagctagaacactttgcagcactgtccagtagaattttctcaataattggaatattctgaatctgcactatcaaatatagtagccaccagccacatgagactattgagtatttgaaatgtggctagcatgactgaggaacttaacttgttatttaattttattttaattaatttaaatttaaatagccacatgtagctagtggctaatgtataggaaagcacagcttgcacatgctcttatcacatttagaagaatctgcttttcctggcctctgcctctatatctgaccacatcctatgaatggttctttcactctctgcttcagatacactggtctttttccaggtcctcaatcacaccaagctcagccctgcctctgtactttgcactactattccttttacttcaaatgcgtttctctcactcattacatattggcttctttttaatcattaaggggcctcaacttaaatgtcagattatcttttctatatgcacacttttataatgaaactggtttagttttgtaatagcatttgtcacaaattgtagttgcattttaactttttaaatttgtgtttacattctatcctgactcccaccaatctgtaagcttcagaagggcagggaccatgtcagcattgttagtcatggtgcatttagagcctgtcacagtgcttggaatttactaggtgctactcgataaatattgtagaaacaataaataagacaatatttcccactgtataactacaccaaaacagtggctgggtagttaaactaaagtttttctggtagctcagtgattcagaaaagcacattagcatatggtccatttcctcagtggaacttaaacgatttctctctgtttgaaagcattaggttttggtatatttcatttatgatatgtgttacattcttacttttaatatttaattaataagatgaaatatttcccatatttactgcttggactatttctattcatagaagtggataaggcaaaactttataaaactttttagaactctagcaggtggtatgaatgctatcattgatttagcagctaaataggactagttctgcatattcaatagagcaatattctctagctatattccttgttatcttgggaatgactttgcttataatttagtgttggttttaactgtggctctgaaactctgcatcctggcttgtgggtgatggtctctgggtgtttgacaagtttcttgtaatgctgagtacctaacagagcatttacagcaggttttgcaggaactaagtggaaagctgccattgtttccattgagtttccagaccaaaggtatgtgttcaacaaatggtatcattcagattaagtttctgactctaaaaaaatgttagttcatttccatccagtctgactgtatcctgaccttacatatgagagagctgaaaaatgagttgaggcatctctaattagcacttctgatcagaacaggcacagagtattatctctaaagaaaaagactttctcaaaagcactgagccctctgctttcactcctttctgctccatgaggacagtgaactccagagtaagaacggcaggtgtcttgggttgagttccccaagaagcaaatttgaggcaagaatataagtgcaagtaggccatctgggaggtgataccaggaagcatgaatagaggagtgagaaattagatagaagaggcatcccagaaagggtgcattatcaagtcagttaccactgtggataactagggcctgctggagaactctgggaaactgtatagagcatacacctcagagttttgccaactgaagggcaagggagctggggtatttatatcccaacttccattagttatttgttgagggctacctcctgttacatctccttccacacttctatcttgcttttgggcatggataaaacaggctccagcagatagagaaatctgccaggcaaagaggtatttcagctggaaattgggcaggtgaacaataaacaggtaaaaggagaagttgcatgatttgggcccagatgactttctatctctatctgtctgtctgtctgtctgtctgtctgtctgtctgtctgtctgtctagatattatatgatatgaaagtgtgtgtatctgagggaaacacagaaggggtttgggtttctgtgtgggacagtgtgtcttagtggtatgtggtagtgcttgtgtacaggtcttggcatcaaatgtgtaagagtaaaatgatggaactagaagaaaacctggtacctatatgaaaatttggaggattcaaataatttctccaaggcatgaaagtattattaatgtcaccaaatcatggaaatatagacctagaaggaatactactgttaatagcagatattttggaaatgctagctatgtgctaggcgctctgctatcacctaggattgtctcatttaatcttcacaaaattctatgaggtaggtacaattatcactcttatatttttagatgagcaaaatgaggcatggagagattaagtcacttttcagggctacacaggtaaaggaagttagaaatactctcatctaacctttctgttttactaatggagaaactgtaacgtttggggtcagtgtcttgtccaagcacacacaattgctttgggttgggctagttctagaatctagatactcacatcctaccatgctcccttcttatcacacttaatcatacattgatgttttgcctcttgctgtttcattggtagctgtgttctaaggatgcatcataccgactggaggcaaaaccaaaagtggttgaccatgtacctgtttcccttccattgctcctctcatctccttgaatgtcgaggtgaattctccaatgaagtcatgcttgccattggagtcccagtcccatactatgcactgtaagagaaaacaatgatctttcttaaaaaattaagaatgtagccacagcagctgaaggcaatgttaactttaggagaaagagtagatgaaagatgtttggtctggaaccaaagcctgggagtctaagattggagcatatgggatgtaattctggtttctatagccctttacttggactttttgtaatctgcaaatggccctgtgatgcagcagtgactacaatgatctgcccatttttcagataaggccagtaagacccaagggagataagtgacttgccaaagggaccttctagtgaatgaaaacctgggacttgaaggcaggtgccctgcttccaattccagtactcttttaggcatagcaggtagcctccctggtttacattggcattaggtgcctgagtccatctatatagctttcacaatggcagctcctgcttcatgatttgaatggggccatattaatcacatttttctttttctatttttttttctgaaggcaaaatagcaatgacaacaaaaattattaggaaggcaaaaaatctttaaacgtacctatgtgaaaaatggttggaaaatagtgcacagacaataccagatatttaccacactggtaaatattatgcacccatcacacacaagatgcaaccattcacttctaacaaaagggctaaatattcagctctcgagtgatactttttagagtgactagactgaatcagcagcaatccctgtgcttggtcacacatctaagtgaagaggaggtctccacgtactcccagggtggagactggattggagtcttcagcactttagatatcattgctacatcttaagccaaagatttgcaggaaagaagctcagacctcaaataagatcaaggcagcaaaggggaccttttgctcagaggttttccttggaatattggggatctaagaggcagcttagttcttcttcagggcgcagatcccactggccggtcttgcctgaaaaatctgacttggtaatctgttcccagatcctgcaggatgcctcatagatctataatatgatctgtctaaaatgaaacattgtttccccctaaatttattcctactcatttattttctgtcacagtgaattgcatcaacactcattcagttactacaaacagaaaactgggcatcattcctgatattcctctttccactcaccctcccacatcaggtcctctccattctgtctcctaactatggcttgactccagcacttctgtctattcctactgctccttctcatctgcattactacaacagtctcccagcttgtctccttgtctcacttgtactcctatcccccttataacccactaattatgttaattccctgcttaaaatcaaaatgtatataggctagcaggtcttccaaggtctttcatgatctgactccctcagtacttccaaattcaccgtttatgatccatgcttactgtattagtcacggttctccagagggacagaactaataggatatatgtatatatgaaaggatgtttattggggagaattggctcgcacaattacaaggcaaagtcccatcgtgttaggccatctgcaagctgggaagccagtagtggctcagttcaagtctaaaagcctcaaaacccgggaaactcacagtgcaggcttcagtctgtggctgaaggtctgagagcccccaggaagccactgatgcaagtcctagagtccaaaggccaaagaatctggattctgatgtccaagggcagaaagagtggaaggaagcatctggcttaggaaaaagaaggaaatcagaagactcggcaggcaagcaaggttataacaccttcttccacctgctttgttctagccgtgctagcagccgattggatagtgcccacccatgttgagggtgagtcttcctctctcagtccactgactcaaatggcagtctcctctggcaataccctcagagacatacccagaaacaagacttttccagctgcctaggcatccttcaatccaatcaggttgacccctaatattaaccctcacacttacagtctttgaaagtttctctaaaatggggtcggtaggaatgaaaaacatttgcaatgacctttttaagacatcaagaaaaactaatttctcagcttctgctatctctttaaatatggaggatttggcagataattattttgcctaagaaatattaagaagccctttggttaggaaggagaattcattagaataaataagaatggaagagattaagacaaaaggagctacatttctctgctgaaaaaggtaatggtcaagttgaattttctctttgataacaactagagacacagaggtgggaccaagacatgagaattgagaagaaattagggtgggtttcctcagagggctgaagatggacccaagtttggggtgggaggaggggagagacaggcaaggaattttggaaactatgatgtctaattttcaaggtgagattatttatatacgtcacccttccattcccctctcccaatttgcccttcttccattaaccccaagactccagcaaatctgctacccataacatcattatgctgatggtgacttggagaataaaggagaggggctgtgtccatgttgtggggacaaagcagaccagagagcagcatgagatggcccactgcaatgaccaagaactgaatggggagcaggactgtggagagacagcttgacaggtaaatctaggggtggaactctacagaaatactgtggagcagtggagctccacggaaataccatggctgttctgccaacctgagtccctaagtgagggtagtacagaactctcagatgacctatgtgtgggtaggaaataaacctttgttattttcagccactgagattactgcagcataacttagtctaagaaccatccaagtacttaaagtactatcgtaggaataggcattacaatttatttttttctgattccaaaagtaggaaaaacagaattttaagaggttacaaagaaataacaaaggaagtattttccaataaacctgtaccaaacaaaggaatctgtttgttaaaaagtgttttattgctggaaatgttcaagcagaaactgcaggaccacatgcaaaaaatgtagtaaagtcaagcagacagttatggaaaatttggtgggatgtttttaaactttcttctaattcagaaatgctaagattagttctagtcacaaaggatacaaaatgaagtcaatgaaaggcttagctcattctgcttgaaatgctatgcaatgcaatgtagctttgacaggagtgatgggaagccctttaattcaaggtaggatgaagttctacctcatttttcaatgaacagtggaacaagtaaatgattcagtaatttggaaaatcactcaggatgtgcactgtgatcatcacattgtagaacactgaattgatctgctgttacaatcagatatttttctctctttgtgccagcccctccttattgaccctggcattcacacactccttacctggagaaaggagcagaagaaatcttgctgggcttagacatagaaagaggaagaagagtggtttctgggcccttgtatttgaggctcataactttgcctgatagtaagtacagctcactgaatgcctgcatctgacatcagatacttagtcttttacctttggaaggagcaaataaaaaggcaaaggaggcagaagcaaatagaagaaaagaagtgggagcaacttttttttaacactaccctgaaatgggaaagagcaggagttcccttctttaggggacagggcacacatcccattcaccccttcattgccctccattagattttccatcatgctttggtgaattactgttcccccttaagctgccaacctcaagtctttaagatgtttgcaatgtgctctctggctggggcagaaagggagtgaccagcaggcctccctgagctggaggatgagtcaggcttggcagaactccatcaggggcctctcagcagcaggcagtgctgcttacaggggtctctttcttcaatcagctagcattcctcatcagggcagttgcagaattttattttgacctttctgagaagggatcccaaaggaagaaagacacagtgaaacagaccaataaaaacactgtctttccttctctccctggcatgaagctggcttatgacagctctgatgcagctgacagaggaacgcatcttggtgaaaagtaaacagatcaaccaccctgcagaaaaactgagacagaggcagagtccttggtgtgaatcaataagaaggccttgacacatctgtgagagcatagcacctcaaaactatcacaagccagaaaaccttctcaggttcttacatctcacagagcagtttaggtataatatctttaaaaatgcataagcttgacagatagtctaattaaccccctccttttacagaaaagaaaattgatgacagataagtgacttctgccagttcacccagtacagagtggactaaaatctggttttcgtacctccttgatttcatcactaccacacaaacacaaattataatagttaaaaagtatatagtgcgtactatgtgccagacattgttcagagcacttcatacatattaactcccttagtccacagaacaacttattgtatgcttattttacagatgaggaaactgaggcacagaaagatgaaggaactttcctgaaactacacaactaacactaggtaatccttgaaataaaggaagttaagcatcatagcttgtcttaactgagcatcttttataaacccaggccatttgtgtttatggtctttaattctttacaataaccatgacacgacaatattattactatttacaggttaactgccatttacaggtgcaatttacaggcttggagagggaatgtgacttgactagacacctggtaagtgacaaaagtggatctgaacccaggtgtctaatgtcatagctgatatacatatatatgtgtgtgtatatacacacacatatatatgtatatatatttgttactgttgttgttatgccatgctacctcttaatagaagcaggaacttagaatcaaggtctcatgagtctgctctgtgtaaaatccccattctttgattgaaactgtaaactactagaatcctctaaggtttagtgagcacaccaaacagtacagaggaagaacctgctcactgtttccacacaaaaggatgcaaagccaagtagtctgtgcattgtccctggggtcttcagctctgtctgtagaatgcatggataagtgggtctgagggatcgggttactccctcctactcttgttttatgattgccttgaacccattaaaagaaatgtgctatgccaacttattgtacactagctttttgtgatggtcagcttcatgtgtcaacaaggctatctggctagcagttcccagttattcaatcaaacaacaatcatctattttatatatgtggttaaacattttataatcagtttactttaaagtaaagaaggttttgtggttccatatgaattttaggattgctttttccatttctgtaaaaaatgcctttgagattttaatggagataacttcaaatctatagattacttctgtagtacagacatttgaacactaagtctttcaattcatgaacatgaaaggtctttccatttatttgtgtattctttgatttctttcatcagtattttgtagttttcagtgtagaagcctttcaactctttggttaagtctatccctaagtattttactgttcttgatgctattgtaaaaggaagtattttcttaatttccttttcagatggttcattgtaaatatatagaaaggttactaattcttatatattgattttgtatcctgcaactttattttatcctgaattactttattagatctaatagtttattttcgtgaagccgttagggttttgtacatataggattatatcatttgtaaacagagataactttacttcttctttctgatttgtttgccttttattttatcttccctaattgctctggctagaatttccaggactatggtttgtttgtttgtttgtttgttttgtttttgatggagtcctgctcttttgccaggctggagtgcagtggcatgatctcggctcactgcaacctctgcctcctgggttcaagcgattctcctgcctcagcctcccaagtagctgggactacaggcgcacaccaccatgcccagctaattattattattatttttttttagtagagatggggtttcaccatgttggccaggatggtctcaatctcttgacctcgtaatctgcctgcctcggactcctaaagtgctgggattacaggcgtgagccaccacgcctgcccggccttccaggactatgttaaatggaaatgatgagagtgggcatacttgtcttcttcctgatcttagagaagaagcttttaatttttttactattgagtatgatgttagctgtgagcttgtcatagatggtctttattatattaaggtacatttcttctatacctagtttgttgagtgattttatcatgaaattgtattaaattttgtcaacccagaatagccaaaatgatcttgagaaagaagaataaatctggtggcatcacatttcctgattttaaaatacattacaaagctacaataattaaaatattgtttattggcataaagataggcaaatagaccaatagaacagaatagagaggccaaaaccaaaactattcatatatattcaactgaactttgagaagggtgtcaataatacacaatggggaaataatagctcttcaacaaattgtgttgggaaaactggatattcacataaaaaatgaaattagacctataccttatatcacacacaaaaatcagctcaaaatggattaaagactgaaacataaaacttgaaactataaagctcctagaagaaagaatgcataaggataaagtcttgacattggtcttggcaattatttattggatataatggtaaaagcacaggtaataaaagcaaaaatagataggtaggactacatcaaactaaaaagcttcggcacagaaaggaaataatcaacagaattaacgggcaacctatggaatggcataaaatatttctaaaccatgtatctcataaaggtttaattgtctaaataaacaagaaactcctacaacttaacttaatagcaaaacaaacaaaaaactcaattaaaaaaattgacataagacttggataggcatttcttatagaaggcatacaaatggccaacaggtgtatacgaaggtgcttggcatcattaattatcagaaaaatgcaaatcaaactccagtgagataccaccttacacctgctaaggtggctattattttttaaaatgtacacacacaaaagataacaagtattggtgaggatgtggagaaattggaaccttcgtacattgttgttgggaatataaaatggtggagcagctatggaaaacaatatggaggttcttcaaaaaatttaaaatagaattaccatatgattcagcaatcccacactggggtggaaatacaaaagaagtgaaatcagcatcttgaacaggatgtctgcactctcaggttcattgcagcattgttcacaatagctgaggtatggtaataacttaaatattcattgatgaatgaatggataaagaaaatgtggtgcatatacatacaatgaaatattattcagccttaaaaaagaaggaaatactgccatttgtgacaacagggactgtgttagtgtgttcttacatcattatacttgagcctgggtaatttacaaagaaaagaggtttaggttgtctcatggttctgcaagctatacagaaagcatggtgctgccatctgcttctggtgagggcctcaggaagcttgcaatcatggtgcaaggtgaaggggagccagcatgtaacacggtgagagtaggagcatgagagagtgagggaggaggagccagactctttaacaaccagctcttgtgtgaactcaaagcaataactcactcattacagcaagaagggcaccaagctattcaggaagactccacccctatgacccaaacacctcccaccaagccccatctccaacattgggaatcacgtttcaacatgagatttggaagggatgaatatccaaaccatatcaggggtgagcgtggagaacattatgttaagtgaactaaaccagtcatagaaggacaaatactgcatgattccacttaaatgaagcatgtacaatagtcaaactgatagaagcagagaatacaatagaggttgccaagggctggaaggtggcgaactggggagttgtttaataagtataaagttttagtcatgttagatgaataagttctagagaggtaatatacaacatagtgcttacagtgaacagtatagtattgtgcacttcacaatttgttaagtgagtagatctcattttaagtgttctaacaaacaaacaaacaaacaaataaataagtaaattgatgcaaggaaacttttggaggtgttggatatgtcaatcagcttgtgatggtatcacaggtgtctgcgtatgtcaaaagtcatcaaattgtgcacatcaagtatgtgcaattctttacacaccaattatatttcaaaaaagctgttaaaaattaagtaaagcggccgggcgcggtggctcacgcctgtaatcccagcactttgggaggccgaggcgggcggatcacgaggtcaggagatcgagaccatcccggctaaaacggtgaaaccccgtctctactaaaaatacaaaaaattagccgggcgtagtggcgggcgcctgtagtcccagctacttgggaggctgaggcaggagaatggcgtgaacccgggaggcggagcttgcagtgagccgagatcccgccactgcactccagcctgggcgacagagcgagactccgtctcaaaaaaaaaaaaaaaaaaaaaaaaaaaaaaattaagtaaagcaaatttttttcaataatctggatgggcctgatacaattaattgaaaagccttaaaagcagcactgaggcttttctgaaggataaattctgcctgtggacaggatctttagctcctgccctaaaatttccagtctgcccttcctgatggcctgatatacagattttggacttgcctagccagcccccaacaatagccaattccttgcaataaatgtcttaatatatgcacatcctcattgttctgtttcttgggaggaactctgactgatataactttcttcacctcttccctggttttcatgtagtaacattctgaaacgagttttcagtgacactcaattggtcctctcatactaaaatgccaacatttattgaacactcactttgtcccaggtgttgttgtaagcatttgtcatgctctgactcatttaatcttcacagtaatcctctcagtgagacattattattatcatccctactgaacagatgaagaaactaagaacagaggggttaaccaactactgctgttatagaatatccaagatcagaaaaccaaacactgcaggttctcactcataagtaggagttgaacaatgaagacacatggacacagggaggggaacatcacacatcagggcctgttgtggggtggggggatgctaggagagggataacattaggagaaatacctaatgtagatgatgggttgatgggtgcagcaaaccaccatagcatgtgtatacctatgtaacaaaactgcacgttctgcacatgtaacccggaacttaaagtataataataattaaaaaaagaatatccagggtgttgaaaatatgactgactttgacatcagagttcaaatgatctgaatctgattcagttcctggtgggcagaaaccagctgtccaaactgtgatcatcacataacgtaactgctgctgatcagtgcacaattctcacagttaaaggaaatatgttctttttctcttggctttaaaatttttatttttttatgtcacaacttatcatttttccaggtaaagtagaaatctctgtcaaatttctcctggctccttagtcataccatgttctaagcttctatgtaatccatttatatttgctttaacatattgctaattacatggtaatcactggcttgtgagtatatccaccacttgaaggacttctgatcactgagatttttatcaaggtagcacagttttggggcacaagtaagaactcagataaatgtttgatgagcaaacaaaagaggcctttctccctgagttgagtctatgacaattctctgagtgtttggccctgtctctgcactgcaaggggaagggaaggtattgtaataaactggttaattattaaaggaggcaattgaactgaataatatgctttaatggttgttgacatgggttgtaggcacaggatcgaagagatgggattctagaaacagctttagggattgtagaggttgctgggagctggacagcaggagacctgagttctatttcaagctctcaggataatgctgtgagaccttgggcaagcttctcaactcctccatacttcagtttcctactctataaaatatgtgtctggaaatgagaattggaatgaatgctctctgagatcctgtctaaaattctccagttatgtggtattgcatctttatctctttttcaatctttgttccaaagcctgggataattatattaaagcaataaaattgttaactatcaatacctgatgaacaatactccctttgttttcttttgttaggtatcattatatccctttgacaattaaaagtcacttgtttattgtctcgtggtgatcctcaccagaggtccatgagatgggaggttccattttttatagatgatgatcccgaaatacaataaagcaactgaaggtgatttattccaaaacacagagctagcaagaattgaattaggccgtgaatctggctttatttcttcacatcctgggcccttttcactataccacatagcttcatagtttacttctgctatgtacctttccaatggcactttttcctttttccttcttttgttttttaccagctaattctacgatgtccaaccacatggtataaatatacatgttttaaaatttctctttgataatagacactctttaaaattgtccccccacccccccgccaaaaaaaaattacccaaagtggtccatggaggaggagcctcgctgggtttactcacaaaatgaattttaaatgcagaccatcaaaattaaaggccaattgggtcagaaaggtaaaaagcaaactgtgttctcataccactcagtctagaccagtcttctaactgtagcttttaggaagtcaagcaatactttatcattttatggagctcttaggcaaatacatataatcataattaggtccaccaattattagggatttatgagaatttgatccataatttagtatttggaatgatgtatttctttaaaaattcagtgacaacatttgacacaaaattagtttaatgctttgtacaggactgtaaacatctatgaaaataataccaaatatatatctcagcttgtttggaggttgtgacttgaatatgggtagattttggccagttgtgtacatgggaagaggggtcaagttcccttgattattgtcccttaattttattgtctttttctcactgtagacttgacaacaaccctctgacatcaacctagctgctaggatgggagttaaaagaaaacctttcatttacaacatgaacactctgatttggacttctgaatttggcagtgcagaatgccaaatagaatgaaatagaactcttcctaccagagggtagaccctataagatggccataaataggacctaaatgaaggagagaatttcttaaatcaaaattacatagatgtaattccagaagtggtgatctgggctggggcctcagtcatgttcatcccttgtctagactggtgggcaggactagtggaaatctgtctgtacaagggcctgagtatcttctgatggactcaacctaaggtgaggtgaaagtatgctggcaagatgggtccaggaaaaaagaactggatgctggaggggtgaggcacagctaagtaaagtctggtgacaattactcaggtttgtccccaggctctgtctccacagactcatgtctcagttctagggaggtggctataaatacaaagccagctttaaagagtgtcttttccccaaacagcaaggaatataatgacatgggtcaagagaacagaggaagtgattttgatgaaacaagagccccaggaatccagttttgggcatcctgagggttgatctatatctctatgcagttgggttgtttcttgggggctgagggtgaaaggatggtagaagtaccagcatctgggatgtccagcagccatagatggcattgatattcacacactaaggtatccatgcaccaaggcaacagcaaagagaggaaatggtgctggaatttttgggatccatgtaacatgactctccctggtttatgggttaatgcttcatgtgagcttctaatacaatgacagtgaagaagggcccttagctattattagcctcaagggtagtacaaacaggagatgatacataggagaagggtatggcatgatccatgccatgaagtagccaagtgacctgtagatgaatgtgtccaaagacctgtttgaaacttgcaaggaaatgattgaagggttaactttaaaaggggaggggaatcagaagtctgctttgcttgatggagcaagaccaagtaaaatgcaggtctttccaccagtctttgttttaagatctattataaatattgggcataccaccagctacaggcctcataaatgagtttgtgcacagtcatccgccactcattttccctgcctagcctattctcccactctgaccccgcctcgagaggaaacgtggagcatctagggcataacatctgtgtggagtgctctgtgctgtcttggggttataccaccttccttattagcagcatgtgtccagactaataaggcttcctctaatcctgaaactcagaccatattatttagtagaaggggcatctcaaagcataaacttcttttacagactttgtcgcaccatttacctctatgtgctccttatatcttgctctctatctgattctagactctctggctgtggactttgctactttttctttttcttctaaatcagttctcagtttacattctgcattttaattaatgcactacattttcattaatggggcaaaacttccttttccaaaatcagagaattggttaaagaagtcactaccttcaggagagagaacactttgatggtgaaagggaacttggtagtgctctggtatggtggaaacagcagcattctcggggtcattcagaattcaattcaaatctcctctgtttcactggacaactaggtaatcatcctcatatcactttgcctttggctacccagttcattcatctctatggtgggaattactttttgttctatttgccaggtcattgcaaggatttattatatgcacaagcacacatatacacacacacgtttttttatcaactacaatagactaggaattgagctggcaaagagaatataaaaatgcaagacagtttcatccctcaagatgctgatgatatagtgcaggtgatggacgtgcaaataaataatagtgatgcagtggaggtggcaaaaatggaggttgcaccaagggttgtctgggagtgttcactgcagatagtcagggaaggcttccaagagcaaataaaaacctggtagtacctggtaaacaacatatgcaagtataacatttctttatcttatttatacagaagaacaaattactaataccagaccctcttctaagcataaggtaaggacaggtagagcaggaaaatttgctgggagcctgaagggacaaccggatggtgtagagatactttctctactctcttgtttacatgatagcctgcacagaattggaatgtaatctgtccagttaaggctctcttcttccctcagattacatgccccagagatggtgcaagtatctcaaagcacttctctataggactcgtgctatgctttggtgaatgccctaggagatgcgggggatgttgtagagaatcaaggacagacctgggaaggcacagatttgggtcccagtgtaccagctgtgagacgttgggcagatcattctattcctctgggtctcagtcctcatctgttaaaacactaatttgcattggaggaaccacaataaaaagtttttatgtctaagaatttagtacacctaagaagagttgttaaatttcagatttccaggacttacctccagagattctgattaacttgtctggagtgggttacaagaatctgcctttgaagcaagcaacttgctaatttggatgcatgtggtctctggacatattcagaaacactacacagaatacccaggagtctgtggtttgtgactatggtagcaattatgtcctggctcccactgtgttcttcaattcaacagcaacaacaacaacagaaaacccatccatagagagaaaacaacaatcaagggccatcctgtttccttaagataattcaatgcagtattgctgtaagtaggcaaatacagtcctaaaatgttactacactcacaaaagccagactaagaaatgcccaggaggagatggaagggcaatgggtatgttggctttatcttgtcagttcacacatccctgctcttctggattgcagccaagctaggggacattccacaagaaatatgtcactcttggaagctttcattggagatttatggctttgggaggcttggttagctcagataagcctcagaggctcccaaatgcttgtccaaaccttttaacttcacacctcactactccttaggaggactgaaactcccatggttgtgtggacagagtaaagagacaggctttgacagtgatttatgccccaggctttcaatgagaactctgtcttcattatcaaagtcattctgcactggttcaacctgtaccactctcttctaccaaatttacaggtgtaatatctatgtgagaaccagttattttatttggggactgatgggtggttggattcaggaaactttattatgtgaattgcaaatatgaacacaattcctagttaatgcatagatactcaataaggcagaatagaccagttggctgttgaggtatgatgcatactacttttaacatctgatgaagcactgctataaaaagttctgaaattataagtatctctcctttacaatttttttgggtttaggactctctgtctctatgacttatatctccacctgtctgtattttctagacctactttggatgagttggatctgtttcatagcaggaagcaatcttatttgatggtttattttcactcattatcaagtctttattgagtacccacactgtgttgggaaatgatatatgtgcagtatatagaagaacagcaaaaaagatacataagtgcaatttaaacagcaataaagatgggaagatagatggactaatctctatataaatcttacagtctagtggtaaaaatagacattaattatacttggaaaaaatgaaaaattaaagtgggcacctaatagggactcaataagtgttgcttggatgaatgagtgagtgaacaaaagcaaaatgtgatggattttttatgcaagaatcttggagcacttttcacaaatgctaagtaagtaataaatctcttcaaatgttttagagtatcagtaggaagtgatatagaaatccatattttatttagaatttaggttaggtacataatttgtaacttcataaccttacaaccccagggttataagacagaaaggctgtgctagttccagagctcaagaggctgagacacagtatctgccatatgtgctgtgaaacaaaacagaaatctgtccacatctcacattggagagacaccatgaggagacaggcattttgaagaaagagtctcagcattctgaaaagattttcctttcaaatccaatcaagatttacaaaaacaattgttctgcatagtcctcagttgaagaagcattggtcagagaatggccattacctttttaagataggattcttcattttccaggggctaaaggctgtcttacctggagaaagaactggacttaatattccttaaattcttgtcctattcttaaaatgatttagaaatctaaggatttaccttttctttactggtgtcattccatctatcagtgggatcacacttgatcaactttggaagagtaattgcatcatacttcttattaatagagccccacacttccagatttctgttctatgtcactggatccattctagatgataatggctcactaaagacaattctaacagagagggattttagaaggcaaactctaaaatcattaatttctacttaatatagctctaactccaacagatgttgatctttccactggaacatcaaactaaacttttaaaattgcaaaatcctcatttgatatggaggaaagatttcctaaccttattgaaaaacatgaattccagttgcatgatgagacctgagtaaatgccttttgattgactgattaggggttgtgatggttaatactgagtgtcaacttgattgggctgaaggatacaaagtattaatcctgggtgtatctgtgagagtgttgctaaaggagattaacatttgagtcagtgggctgggaaaggcagacccacccttagtctgggtgggcaccatctaatcagctgccagcaaatataaagcagacaggaaaacatgaaaagagagactggcctagcattccagcctacatctttctcccatgttgaatccttcctgccctcgaacatcggactccatgttcttcagttttggaactcggactggctctccttgctcctcagcctgcagatggctgttgtgggaccttgtgattgggtgagttaatacttaataaactcccctttatatatatatatctagtctattagttctgtccctctagagaatcctgactaatacaggggtgatatgtgcaatgtgggttccaagtcttggcagtcagaggtcacaactccccaattttcttgtaaagtaccctgtataggtgacgcctaagaagtacataccttttgtcatgttaacctatttgctgctaatacagactgcgtttaaattatttctgtgtgccactaagtcattggctaagtcctctaagtacatctcatttaatcctaccagtgttggtaaccacattttgaaggacactgaagcccaggaatgctaggtaactttattgagattattaagctagaaagggatgaagttagaatttaaatcttattctcttgcatggctcatttattcttctttgaatgaatagtttttgagtgtctgctatgttttatgtaactttctgtgcactgattatatgaaagctgagacagaatgctattttatttatttatttatttaataattttaacttttattttaggtgcagctttgttacatggggtatgaatgattctgtggtccaggtagtgagcattgtacctaatgagtagtttttcagcccttaccctcttccttctctctctctagtagtctccagtgtgtattgttcccatcttataatctatgtatttcactatttttataaagtcaatccaccccagcatttactaagccctagagcattccatagaattatttggtcagagtcattcattatggactcatatttgttctgcaggcaattcagtgtgaaatattttaaacagagaaatgacatgatcagagtagcaatttagaaataccactcaggctgttaagtagcgaatgaatgaagtgggaagggaaatagaagtccaatgagagtttgaagtaaatctgtgacactggaaagattataaagatattaaggaagaaaaaactataagtctcaatatctatgtagatgttggagttgagggagaagaaaaggaggaagaagaaattaaagattactccccaaacttttggttaacgtcattgaacataccattcacctacatgtgaatcacagtaagaacaggtttgagggccaaggaatagtttaatatttggccatgaaaagtctcacattctttgacttctaataagtaccataagtctctgaacccatgacaggtaatcattgtttcttctagcaaaatgcctgtgtctctgtttctaaatgagccatgctactcatggtggtttattgattgctgtgatttgatgcctggaggcaaccttccgttggatccctgaggaggaaaaggcgcttgaagaccagaaaagaacagatgattccatttgtatagcttaatcagtctgcaaaccacaaatgggcaatgtgggatttactgacagacaggaggaagtcttggcacagccaggaaacttgattactatgtatttctaactcatttacttgcttctcttaattattgcctaatgcaaccaccataggtgttcaggacttgaaattttgttttagaataagagaacaatacagatcccaaaagcatggagaaattagctactcctaaccaatcatacatgaatgatccacacaaaatagttttgctactgctatgtccaagccaattctgggtgtttatagtagattggactgaccaccctcagataatgaaaagacactcagacatctagccagattcacacacgtggttctggaccctccgttttatcactactattcgtcatggtccctgctctggtctagtgtccacgacatttctttggattacttgggctgaatgtctagtttatccttgggcacaaaatcatcaggacattttagggccttgccaatccttgggattctctcagtcttggctccactgggcaaccatcatatctgacctgggtctggatcctgggttctcctcactgcagaattggctgctggctgggaccttatgtagacttactccagccaccctctaaatgtctggaaaccaagtttaagataatacaatatttctcttttttcctgaaattttgtttagttatttgtgacgtgatttatttcagttcccagaagcttattttctacatcacttagcctttctgcatagattcagccatttctggccaatctttccctcactgagttatgatgcttagttatctagtgtgagaaaaacagcttggaagttcctcgatgaaacaagaaaaccaaaaatttgtactaagctgttagcctaacattgctaccactgaaactctgtttgtcaaagagaagcaattctcctcctctaaacaataattatgacagacagacttttgggtggatcactttcctgggagataaaatgacttggttctttgagtcagccaggaagacatcctattccttccaccgagatggagtcagacacacatttgcaagatggacaagcagagagctgagattttggcagtgttaagcagggccactgacctatcccaccaggcttatttcccaagtaattgaacttttcttctcatttcatcccatcattggacagaccaatagatttatttgtctttggagagataaaacagatcttctttacctggaagtgtaaacccatccattcactgatggaaatggccctccttttaaagtggtctcatctataactactttgagaggccagcaacattattagaacctaattagaaatttcttctggctatcataacattcaacgtattttcaaaggtagtttttgataaatggacccaagtttctatctaaatccatctcccacataaaggttatcatttttgaaaaagcacacatcgaaatgtattaatccatatagtggcaaagcattttaaaagttcatttcaaagagcatcagtactatgggaggttaataggtattaatgaaaaattaaaaagggccagatcctcaaatacatttggattaccctgagatgatagaagttaaaccgtttttgctattgcagaaactctgagagcctttgaaatgacaatgtgcaatgcctattactaggaggaggtaaaccagccaccaagggcacaaaatttaaggaagcagtcattcttagggtattacaagtgcagggttgccgcttgcattaagctgacagcagctgcttccttaaattttgtattctatacatctactacattgtcaataattgttaagattagggcataatatacaatcttccccaacttatttggccaagaaaataacttgtttatgtatctgaatttaggtaaaactcatagtgacattagtgtcttgtgaaagaagtttgagaaatatttttttcattcaattaatgctatattttgagtgcctactatgtataaaataatggcaagacaccggtaatatggaaatgaaaatgaaaactatccctttccttaaaaacttggaacacagtaggggaagtcagttcaaataaaccaactacacaatttaataagtgctatgctagtggtgcatttaatgtggagtacggtgggtttggagtggatagcaatctgactgagccaggagtttgaggaaagccagtgaaggacttacagtagaattgagtggggaagctgagttgtgaaggatgaatgcaatgaagcctgaagtatgacaggatgtgggtcttctaggtacaaggagcagcaagtgtgtgctaaatgcactgagatatgagaacccacagtgtgcctggggcactgcacagtgttggttatgcctgctgaaatggagccaaggggaggaagacaactttcattgaaatcaactggccttaaggaaaggatactctaggaggttgataatagtggagaactgagaggaagggcaagaacagtgaaggtctgtatgaatatatgtatataaacaaccttcataaaccaatgtgtgactagaagggtatagtaaacacataataagaatcaacagaactaggaagaagtctaaaatccctaccatagcttgtagacccctgatggtctctgcctacttctctagcctcattccacaacactcccccacctccctgacacccccattttccttctcactgtcaggcttcaaccacacaggcattctttcctacttatgtcagggccttggcacatgctcttccttctgcctggaatgcttttctctccaactttttctagatactcctcctccaatttcagatatcagcccatatgttccttcctcaggtattcaggctagatctagcttgttataaactttattctatccttgtacttttccttcattgcacagttgggatcatatgttttcatgattacttgattaatgtatatttacccccaaaaccgtaagctagctccatggggctgcaaccacttctatttaacttacaattttattcccaacagctaacaaggaactttgtatattttaggtgctttacaagtaattgttgaatgaacgacatggttggttagctatccaccaaatatttgtgctttccagtgtagggttattgatgggtgggtacatttcctagccatttgactagacaccgtcaagggaatgtgatgtgtttcacctctggactaaagtagttaggaatgaggtgtgctctctccattctcttttcctatccaccagctggaggtgtgagactttaggctttagaagaaggtgggatgataaagacacaggtgtttaaaaccaggatgcctgaatcattgtatgaagactgcccaagaaaaacttgattagatttttttgactaagaaacacatcttcattttactaagccactgagaatttagtttttaaaaaatacatgttaaatgatacatgtaagggaataatgaaagattaaaatacaatctagatgtgattggaatggagctggttctctagcccacattagctaagaattttcaagaatatttcataaaaacaagctaggaattaatataaacattattgttgccatatttgtgtttgttcaggttgaccatatagtaaaatggctatagctttcattccagaccaggagttttattattctcccctcatctagttgatataagagcccctactggactgttacaaatgaactcttgggctgcatggacgatatccaacttttacagccaagattttcatgctcagaatgagtaaagtaggtttgcataattcctttaagaataatgttttaccaagattcgtttttgtttgagtgtgtaatgtattacactagtataatacttccaccaaacaaacttccccctctcctttcctttttccctcctttcacaaatattttttgaatactaaccatgggccaggtactgtgctagtcactgtagataaaatgatgaacaaggcagccattgctttttccatcacaaagcctataatctagcaagaaacacagataagtaactaagcaactacaatgcagcattgtaaatgctatcttagagagtcttcagggtgctacaggaaccctttgcagggccagtgaagcagatactatcaatatgttctactctgtcacattgaattcctttatcattttgaggcacaccagagttcctgatgtcttttctctctcaacactcagcacctcagcctctttgttggagggctgtcctgagactgctagattgttctccttgagtgtgcagtactggaagtgcttggagaaatccttaccagtgactgacacacagcaaggtttaaatgttgttcattgagacaactgagatgtgactacactgtttttagatatccctggcaggattgggccaaaattctcctgagattttgctttatatcctacttttgcttgtctccttctcctctctggtcctaattttccactctcctatccgttatttctggaaacactttcacatgaatccttatttcagggttgcttctggaggacctgacctaagattggcatcttactcagtccagaaggtcagggaagacttcttggaagacatgccatctaaaacaatgactgatggaggaatggaatcatccaagtgtacggggagtggatggaagacaagagcattctaggtaggtgaacaggacaattcaaaggctcctcctggagaagccacagttggatgcaggttatctctttagaatccaccttaattttccatttcagcaagttttatggtgagctcacattttctttaacctttatgtccgtgatataaaattcctgttttcttataatcagcatttatcaggagtctttttttaaaaaacagaaaacaaaacgtattttttcctcatttactaatagattcactgcctataacagtgtgaataatgtgttggccaaaggagaatgagatagcccattatacttattgatataaattatccttgatgaagaaagtccatgttcatcaatgctgatatgactgtgtcatcaatttaatagctgaatgctaaggaccattaaatttatcactatttgctatacccttatttataatagtgcccaagagtaatatgtaattaacttcatgactgattgacaaagtaaactacagggtaatcaatcatattgtataaatgcttgtcattgggccacatgtggaatatggaggttgacttgtgatgtttcagcacttccctgtcttgattgttgctcttggctgtttagatctaaagtccctataagtgttggacttacttatttaaataagctggttgctacaccttgagattcagtccaatcttgctgtctagcatgatccttaaccgatgtcctttgtgtgggcatatggaggacctctcctttcctcttgatctagaatgtcttttttttttttaggtcttccccattcataattgttttcctttgcataccagcccctgctttcacttagactttcttctgacatttgtatttaaaactagcaatttgcactctcctgcaatagtttccccttactgaagtcattttgtaactcttcctcctctctcagcttgccagaaatgagaaatgcctataaacttcaccatgagcaaggataagtgagcccaagtcacgacaaataagcccaagtcacggtaaatgagcccaagtcaggttttctctccaagtatggactgttttgcaaagcttacagtaacccagaagggtcagcttctttgcctgtgatagctatttgtaactttagaaactccaggttttgtgtgaccaaaaggaagactaagataactgtcataattcattccaggaataaaaatgggctgggtgcagtggctcatgcctataatctcagcactttgggaggccaaggcaggcagatcacttgaggtcaggagttcaagaccagcctggccaacatggtgaaaccccatgtctactagaaatatgaaaattagccaggcgtggtggcgggcacctgtaatcccagctactcaggaggctgaggcaggagaatcacttgaatccaggaggtggaggttgcagtgagctgagattgagccactgcacttcagccttggcaacagagtgggactgtgtgtcaaaaaaaaaatactagtgtttcttttgtgtgaatattgaagctactatgcaataatctaacatggttgcacatggcaattgggcctctgtggttaggtaaggttttccctgaagtgaggaggccttaattcacatatttgtcatggaagaggagtcagatccatagagtggtgaaagagagaatcctgtacctctctcttggcatctctctcttagatctagactaggatggcaaataccgggcacaggcattatcattcatcccccgattactccctctttatcctcttatcttcatccatgcaagacatcactaatccatcatataatttcctcactgagctgagataaaacctacgttagactcctcctcaatccagcatagcagttagttgttgtctattgatcacagctgaaaaataaaattaaaacctatttcctattgttggtctccagtctgctgagtcaggaggcatgtatgtctagaacacactgatggtagcatgtgtgctaggaggaaaagaactacctgaatgtcattaccttagtcaatgctgcagaactgcaagccctgaagaggaagtcgtatcttgtaaacaagatcattctagtttcatacaactcctagatttattttctctgtgttatcttctgtctttcagagacatttggtttgaatgatctggtcttgtcacagcttggccacagagtacccagaggagtccatggttgggtcagagttaagtgggaagttgagttaccttgaaaacagagtacatctgaggctgctaattagtgaatagttttagcaattccaggttctatagttgagcttctttttcttaccagaggttcttcctcctactgacaaccttagtgagcctaagtgagattaccatctcatctctgtttttcacaaaaccatacatttttcatggcaagtccttctagtttcttgtggcttcactaaagccccaagatcaggtagcaggtaccaaagtcttctgatgactcaagaccccaacatcctatggataaaatggtgatgattttctcagcatgagtttccaagagagccacaggaatcttgccttcttttctttctgtctttacctagaagtttagtttttatgatgctctctgcagctttgatctataaagaggggaaaattggcaaatatgagccttgcaaaacgttgttcatatttgcaaataactaccttggcaggcaggtatgtgctctgtaaacctaagtattgctttggcatgtgagtcaaaagggaatttgtaagcaacctttaggcagctggtcttggagaatacagcttggcctgtaacctagttcagctgaaaaatttggacacctcatcactgctaaacagaccatcactcccctttgtgtctttctggtcatgtacaggtcatttatttggcaggttctgtctaactccattaattgatggcatccaattcatcctttggccctgagtcaggattctacaagatatttttttaagcccaaacatcattccaaccaaaaaaaggggtaccaaagaacagtatttaagatgtatttttaaacttaattaagagtttggtggattgtcatttggcccagtggctggcctggcacttgtttggattcctcaccagccccgcatagagaaacatgaatccacctttaggcaaatgagttgtcttgaggattttattggtttgtagcccaagtcagtgggtaaggggtggatcaaaaggcagagaaataaaagacagtgagacttactgtgaaggtatagaatccattctgcacatgtctatactattgttttgtgatctcattcattaaacccaacatgtccccagcatgtgctcagtaggctgttaggaaacatactatgtacaaatgagtttaaaatcatggtcactgccctcaagaaacctgtcaaacagcagagaagataaatatatgctggaagaaggtgaaaaccaaagtgaaattatgtgataacttactaggaactgcagagaaaggtttgagtgaaagcaaaggagaggggtgatttgttgtgcatccttattggacatgagaacagtgtctgatactcatgtgtctctttaacttgtgccaggaaaaaaagtaggtgtttaataaatgcttaatggatgtaattgagagacaatatagaccatttcctgtagggagtcgtttttgaagtaggtctgaaaggaaatttggacttggggttgacagaagaagtaggagaaaattctatgtaggaaactgaaggagattagacatgaggtggggtcaggggcagcctgctgaagcagaagggaaggacagagaatggtgaaaaagaaccaatgtatatggcattcatccttaggtagggcttcctcccagatttgaccctcactcagaactaactagagatacaatagttaccttgttcttaatacttgttcttaatgtcttaataccttgttcaagatgtcttaatatcttgtttttaatactcttgttcttagccaagttatgggtatactgcattgttctcagggaaaatagagtctccctggggtcttaggaagctcacacaagtatcctagatcactattcttaaactttagtatgcacataaatcacctggggggcttgttaaaacacagatttctggacccacccacaaagtttgtgattcagtaagtttggggtaaggcctgaggatctgcattttgaacaatctcagatgacgatatgctattcctaggaccatggtttgagaaccactgtcttagataaatatacagtttcctttccctcatatttgcactgtttaccaagacatggagagaatcaaataccgtaagattgctgtgatgagcagagcctttaacactgttgtaaatacagtttaggtctccagctcatagaaaagccctggtctcatggaatgtatctaaagcactcagttctgcaatagattatcacagaaaataataccatagcaataccattagttaaataaaatgcaaccttgaacgtgtgtacttcattctaacagatgatgcttagaagttatgccaccactacactttgataaagtaaattgtattttaacacattaggaacctcactaattgaagaacccttagtcaatgaataatagagtggtatagaatgaattgtaaaataataacatggtacataaaagtgttcttaaaacctttgtttatgtgctttttgagttggaatttatttttatagatcataagttttttataggaagagaagtttggtttatataggcatctcaggctctattatgacactgactttgaacactttactgggcagtctaggctttagaacatctgcatgcccataatcccagctactcaggaggctgagaggcagcagaattgcttgaaccttggaggtggaggttgcggtgagctgagatggcgccactgcactccagcctgggcaacaagagcaaaaccccatctctctctctcacacacacacacacacacacacacacacacacacacgcacacacacacacacacacacaaaagaacatttgctactccacccccgccacagcccccttctgagggtttctctccatataacttgctataatggtatctcatgcccatgctcccctggccacagatgaaagacgagaaatgggtaccttgtttaaggacaaccaagctgtacattgaccagagcctatgaggtgacttgatgtagaagttttactcatcataaacaatggagactaactgaaacaatcagaacttgagacagagaaaaagaataaagcagttagctgtgggagtaggagcaagagaatagtgaaaacaatgtgatagctgagttgccataatggtatagcatgagaataaatgcgaacctctgctgcctaggaggttaaccagatgacccagttgttagggctgctctgagttctgaaagatttttctgagtcttgagctatttaataaggactgtgagccctggctgttcagctcttccagaaatcctgggagtgtggccagatttcctgtctttccaattttttcaggtgaattcttgcaaaatcttcccaaactagaggtaacccaaattcctctggataaaaatagcctaagcaacataaactcctatgaaaagttcctagtgacagatttggcacacaggtgatgcttcttggtcccattaccctcaaaccttcatttcaggtctctgagctaaggttttctgtgtgctgaattggtatagtatttctctcctcctcttgttgatccctcccaaccaatgaatcagtatggtaaaatctgtacagcttcgaattaatcagaactgaaggcacataaaaatgcaaggaattaaagaacagacagaacataaaagaaaaaggtatagagtgagagtcaaagagatcagctctcaccacaaaggaaagctcaaagcctttgatgaactgcacctataaataactatgagctctggcaatccctgtaaggctttggccaaatggttcaggtccatcggggataatgagggctagggacatgctgctaacaagcacagctgtaacataggctagaggacaatgtgcttctgattgtcacttgtatgatgtagatttataggacctgagctctgttctgatgaatgccccaaggaagctggtattctttgattcattaaacgggaacttaccttgccttttctctatttggtcttaggaatcatatcttaggttaagtggtaatttggagatcattccactcttaccctctaattttaaggatcagaaaactaaggttgtggaaggggagattacttaaccaacaccacacaatttattcatggtagtattgcttttaaagccttgctctacctgctcttagctcagatgcagtaaaaaattcatcttactgacttattcagtcacttattttgtggggctgtttctaatagctctaatgctgtcacatccctttcttatttgatccccccaacaacccaggcagatgggtagagatcttttcattttacaggtgaagaagctaaagatcggaggtgaggcctcttttttggaaactcagatactctgatttctaatacagacgccttttcaataaataatttatttgaaaacaatgtgtagactaaaattttcaatagaaatgctgatctttatcataaccctcactttcttcccatgccacactccctgtgctatagcagaggcccatccttaaggacaaagtcttttttgtatcttcagttttctgcacaacatgttgctattataggaattctcctcaaattaagtcataatttccactgggttatatacgggttccatttggaaggtgggaactttctttatttccaacaaaccattttctccatggagtgaaagactttaattctgagtctttgcttggtcactgtgaccattttcttcagagggttctgtttgacaccaatattaactcaccatcagtcaagtcattcattcattcattaatttcttcattcatacatactccatttccagagcagatgtgtgacagatactgtgctaaatgctgaagacacacagataacaagatgtggtacctgttttccagaaacttacaatttagtgtgtatggggaggtgagctcagggtatgggagacatcactttggaactgggtataagataactactggagatacagggaatgtctcaagaaattcctagtgggagactttggctgactacccaaggtgtgggggagtgaatactggggtagtttgggaaggcagaggcagctgtaaaagcatagaaagggatgcttaactcattttaaatgtatttttaattgacaaataataattgtgtacatttaggaggtatattgtgatagtttgatctatgtatacattgtagaaagactcaatcaagctaagcaacatattcatcacctcaccaacttatgacttttttgtggggagaatattacaaatctattcttttagcaattttgaagtatacaacacattattattattaactgtggacacaactcattttcttgcttactatcctttgggctactggaaattgtattagtccttcagttttctacctgtatgttccacagtatcggggctttcttgcagcatttctaggatatttatggaaagaaagtacagtttaaggtagaatgtgttttctctgcatttgttctgatctcccagaaacctgttccattaccactcaagattaggtgttcaagcctgaagtatttgttagagaaggcatttcacaatgcctggcatatcaatcaaagccatgtgtgttcatacagcatacactgttgaggtgggagaagcagaggtccccattcccaaggagagagacagcattggcccatgactaccggctgactgaacaccatagagtggttcatatttaaaggcttgtgtgtaacccaaggtttaaggacaacctgtattcctggggtgttagtctagggatattgtggaaggttttatggaaagcaatatgatgtgagctttgaagaacagtgtggcaggtgaacaggtaaaaagcattgtggacaaacttgtaaagttgttgcccatagagtaggaggaaaatgacctggtcaagcagagagcttgcaagggagcaattgttggggaaggggatatgattgtaggtaaaatagggaggcagataaggatatctagtttgaagaccttaggaaaggaaaatcacaaaggactggaaaaagcctaaatccccatgatggtgtacaaggtctcacatgattaagcccaccattttcttgtgaatgagaggaagctgtgtagcagggagagctctgaaagcctgtgtaattacacgatgaagctgacaactggacaaatagggaaggtcctggcacaggacttagacaagtgtttctggttgtctttctgtgacatttgcagagtcagtcagcatccctcagctgtaaaaactataatatgacaggtattataatatagggagagacatgaagggcggtaagagaagataattcacaattattgaactctgggctttgtgtgcggtgaaatgcacacacgattccattcaactctccaaccaatgaactcttcattttacaggatcagagtagctaagtaacttttccaagttcattggcttgaaaaatgtttgttcaaacaaaggtgtgcctgatttctaagcccgtcctatttcatcatgtcagttttgcccatcctagcctaataataagagtcactttggcgtatttattacacacttagattccaaagcccttgccaagacttagaataagaattttaagtgaggtgcctaggaatctgcatgtttaatatacaccctaaatggttaatacgatcaagtcattttggggaatccctgcaatgtgtcacactgccttgagaaaaggcataaggttagagaggaaaggggagggatggaaagagattaaggaggtagaattgacaggacttgactgattgcaggagaagtgaagccttcagtctctgattagcatttctgtctgaagttttgtaagcgtaaacccctgcctagcaacaaaatcctcctctaattgggcaaaagtagtgagtggccattctgccaggctctctcgggtgtgagcatcccaggagagttttagccaggacacagcagcatgctagtgtgctgctctggttgcatatgttggagatgattttcataacactcataggtaaaaagaaatgtaaaaggtttctgggagagaagccaactatcatgttcctgttttcagaacacaaaaattgctgtaattgtttggttaatttaaaaaataatgatgatgtattgcaagaaaatgatttaaggagagagtttcttggagcaagaagtgatgttaagtgtttaaaggttttaaattgacaaactaggctacggtaaatccttttacttttggaatagtgagccattttccttgagctctttgggtcctgagttactcaccatgttcagcatagataaatgctttttgtccttcagtgaagacacggctgatggtaggcagaataatggttcctcaagtatgtccatacccttatccctgggacctgtggatatgttactttaaatagcaaaaagaacttaacaaatgtaattaagtattttgagacaagaatagaagcccagattatccaggtgggcccaatataattacaagagtccttataatagagggcaggtgagtaagaatcaaagaaagagatgcaataatggaagcagaggtcagggtgctgtgattgctagaagggggtcacaggctaagaaacgcaggtagcctctagcagctggaaaagtaacagcaaatgattctttcctagagtctccagaggaatgcagctctgctgacatctgttttagcctagagagactaattttgggtttctaatatccagaactataagataatacattttcattgctttaagccaccaattttgtggtaattttgttacagtagcaataggaaactcataacaccatcatcaagtggtttttgtctgttatttccatgatgagtaggaaggctcttgtatccaagagggatccttagcaaaaaccagcatggaggcaaaactaagacccaagttcaaagttgattgttttgaccttgacttagcacgcatttctgggtgaataagccctaatgtcttcctttgactctgagacccatggagtttctgttccttataactgccagtgacaatgttccacttcactgtgcctttcctatggtcatttactctttttttattcttttttagacaggttctcttactgtcatccaggctggagtgcagtgccacagtcatggttcactgcagcctcaaactcctgggctcaagtgatcctcctgcctcagcctctggagtagctaggaccacagatgtgcaccaccacacctggctaattaaaacttttttttgtagagacaggaccttgctatattgcctaggctggtcttgaactcctggcctcaagcaatcctcctgcctaagcctcccagagcactgggattacaagcatgagccaccatgcccagccctctcttacttctcttaatgctaccatgtcagatatcctctaggccattatccctcagatactgcaggttttagggccagctttggagaatcttccccatgaaacttgtagtccataaatcctattctgaggaaattacaataatgtttcctaaaaattatgccattaaatggaatgtaggccaggcacggtggctcacacctgtaatctcagcactttaggaggccaaggtgggcagattgcttgagctcaggagtttgagaccagcctgagcaatgtggcaaaaccccatctgtacaaaaaatacaaaaaaaaaaatgagctgggcatggtggtgaatgcctgtagttccagctactcaggaggttgaggtgaaagaatggcttgagccccagaggtggagactgcagttgcagggagccgagattgtgccactgcactccagcctgggcaacaaagccagaccctgtctcaaaaaaaaaaaaaaaaaaaaagaaaagaaaaaaagaaaagaaatgttcttagctgtcacattccaatgtgtctttccctaattgtaatcaatcagcttcttaagcccatgtctcctgagtctctgtaactcagagacggtttattatttgtaagcattggcctcatataaggatagaccactggctgtggtctcttgtctggtttcatcactcttgggaacctccttttacctcacttatttactcccaattttgattttaggaaatggagttaatcccctgctgtaaacatggtttcatttgctatactacactaggaagaatggcaacttaagtttgctcagttatcaataaattagaatgttgattactcacacatgatcttaagattgttatactatgaaacatattgtgaatcctatcctaaagtgtcgctcatttaaaagtcttgaaggccatctcctagacttaataaacatgaacagatgtaggttgacagtcagtagctgagagagacatactgaagcagagcaggcattcaatgtgaaacagtctaggagctacagatacatcctggaaaacttgtttaatatatgggtgcctaattctaggaatatatatgcaacacctgcttatgggaaaaagtctgtgttggcttctatgtatatgcacagtggggaacagtcctataatatagggaagggggaaataattgacaggagagggtggacacttacagcaggtcaaaaatggttgtcctctgcacagtggcaagagggagatagctgcaaggcccatactgaaatcaaagagatctgcctccacaggagtttgccgctgtccgtgattctgaaagtactgccctagaacacagaagtttatcatagcttaagttgggtttcatcactttttgttgttgctgttgttgttctgttgcttggtagccgcatcaataggtgtctagaagagacagaagcatgatgcaaattttccttaaatggagaccaaatgctatagttcatagaggacggtaagtacaaggacagaggaggggccaggtatttaattggagactacaaagagttaatatgataattctgtctgcgatgtctataaagtccccatttctaccttttgctacaccatcaattctatttttatatcatctttttatgtcactaaactctactgtagtgacatacttaaactgaaaaaaaagaaaccctgaacttttatttttatgcaacaagacagatggagtgtgctgaaatgaaatccttcattgggtgatgatttttgttcaggttatgaaaacttgtgatggctcctgtgagtaaacaattttaaatgttctatctcccctccctcctcaaaaataaaaaaatcttgatgtgcaattctgagctacccaggtctcctcttgctgggctaggagctgtcagcagtcacaagagagtttctcaaatcactcctctcaagaactgtcattcttgactagacttcacctccttactcctggcaggtgcttctttatttctacttgcagtcctccctcctgaaattgatttatgccttaacaaaaagctagttcaagcttctgtgtcaaggctgttgttattcaaatcctggtgtggagcagtgtgatctgtggatcagcagcatagcggtcacaactgtgttaaaatgcatattcccaagttgcatcccagacttattgaaccaaaatctgcatttaaacaaaatccccaggtggttttatgcatattaaagtttaagaagcactgatttaggtgatagctaaaccagttcagttggctgaactaggaagacctgtttccaatgttctaaatctgcttgttgggcctatttattcattcaatcggtaatgggtatctatgctgtatgaggcattacccgatgtgggtaaaacataaagagagtatagctccttttctccttatttgtcacggcagttgtttaccaccttgacctgctctttggctctggaagggctgacccttctcaccatcctccttagttttgggtgcctggccttgctttactcactgctattggtgtctttctgagttttgtctgcgaatttggattttgtttccttttgttctgccatgactccacctgggttttctgagtctgacttggccatctttctgaccattgcttatctcacgcaccaagtttgctgaggctgctcagaccctggctctcttccttgtgactgtgtcccattgctacatatggccttagaacatagctttctcattttaaccataagatacatattttcctaactgctgatatctgggtctgggtttctaggaattgtggctttcaccagaaattgccagggtcataccttggggagaagtaacttgtccttgcaccagaaaacacaggactttattttcttaccatgaaaagtatacccttttccccagagcctttttttgtcccttcctcaatttaaccattttttttttacatagcagaataatgaaccataataacaaatggctatattttctagaaagcctattaactttccatattcttttcattctcttttatcactaatggaacttactatacattgagtttcaaccccaagtccaagtagattcaactaatttgagagacctagaacctataaatcttaacatggagtaatttttcaggaggcaaacattgcctgtgctttctagtttcttcagcggaataacgtttctcctaagactggttctatttaaaacgtgctctttccctacactcacatagcactttaccaggtgactattatctgattgggtgctacaaaaactgtgaggtctcatgggatgtatcattgttgccttgaccccagaactgcacttctcatgcacagaagctcatagagatattttcaaaatggtgtttttagcttctggtccttaccctatgcaaacagagctctagtccagttcataaacaggccatggcaggtgctattccatccatctaggtttgccatctctttcctgccagaactctgactgatacctccattattaagcctttctctctctttgcaccttgccagggtctcatatataacttatccaactcctccttttcttatctaaacaaaagttaacagtacaattaaccacactcctcccctcaaacatctatggggtcaaggaactattatttaaagaaacatccaaactctattgcccaattagtcctttcatcccttctccattctctctaaacaaacatttattaggcctctattatgtatcataaattatattaccatattttattggcttgaagtcattattgattgaaggaagcaccattatttcaggtcctactataaagttaaaagcatccaaaattaggaatttaacaggagacttctacctaattctgagacattatagatttaccctttgagggtaagagtaaatgagaaaaaaagctcactatgcagaacgggacagtaagaaaatgtacatatatcaactttggtattggctagagacaggaaaaaaaatctcttccaaaaatttgaaccaaagctggtacagtagtgcccatttatccatggaggatatgttctaagacttccagtgaatgcctgaagtcgtggatagaactaaatcctatatattctatgattttctttatatatatctataaaggttaatttataaattaggcacagtaagagattgccaaaaacaatcaatgcaggcacactttgttttattttgcttctcagatattacatttcttacaagttgaaagtttgcagcaaccctgttttgagtaagtctatcagtgtcatttttccaacaggatgtgctgcttcatgtctctgcatcacgttttggtgattattgcaatatttcaaactttctctttattattgtacctattatggtgatctgtgatcagtgatccaaatgttactattgtaattgttttgaggtgccacaaactgtgtccctataagacagtgaacttaaacaattaatgtgtgggttctgacttctccaccaactggctattctcccatctctctccctctccttgggccttcctgtttccttagatacaacaatattgaaattaggccaatattgttaataaccctaaagtggcctctaaatgttcaagaaaggaagagtcacatgtctctcactttaaatcaaaagctattaagcttggtggggaaggcaagtcaaaagcctaaagaggccaatagctaggcctattgcaacaaacgcttagtcaagttgttaatacaataaacaaattcttgaagaaaattaaaagtactactctagtgaacatatcaatggtaagaaagcaaatgagactttttgctgatagggagaaagttttagtggttcggataaaaaatcaaaccagtcacaacattccattaagctaaagcccaatccagagtaagtccttaattctcttcatttctctgaaggctgagagaggtgaggaagctgcataagaaaagtttgaagctagcagaatttggttcatgaggtttaaggaaagaagctgtctccataccagaaaagtataaagtgaagcagcaagtgctgatggagaagctaaagcatgtaacccagaagatccagctatgatcattgatgaagatggctaggctaaacaacaaattttcaatatagacaaaacagtcttatattaaaagtaaatgccatctaggactttcttagctagagaggagaagtcaatgcccggcttcagatctttgaaagacaggctgactcacctggtgactctaagttgaagtccatgctcactggccacgctgaaaatcttaggttccttaaaagttatgctaaattgctgggcacggtggctcacgcctgtaatgccagcactttgggagactgaggtgggtggatcacgaggtcaggagttcgagaccagcctgaccaacatggtgaaaccctgtctctactaaaaacacaaaaattagccaggtgcggtggtgggcgcctgtaatcccagctactcaggagactgaggcaggagaactgcttgaacccgggaggcagaggttgcagtgagctgagattgtgccactgcactccagcctgggtagacagagtgagactccatctcaaaaaaaaaaaaaaaaagaaaaaaagaaaagaaaaagaattatgctaaatctactctacctgtgtgctataaatggaagaataaagcctgaatggcatcacaatcatatctgtttatagcgtggctttctgaaagtttagagtccactgtgagacccattgctcagaagtagagtcctttcataatattactgctcattgaaaacacacctagtcacccaaaagctctgatgaagatgtacaaggagattcattgttgtttttgtgtctgctaacacaacatccattctgcagcccatggatcaaggtgtaattttgactttccagtcttcttatttaaggaatacattttgtaaggcatacctgctatagatagtgctctgatggatctgggcaaagtaaattgaaaatagtttggaaaggattcatgactctagatgccttaagaacattcatgattcatgggaggaggtcaaactacaagcatgaataggagtttggaagttgattttaatgctcagggatgactttgaggaattcaagacttcagtggaggaagaagctgcagatgtggtagaaatagcaagagaactagaattagaagtagaacctgaagatgtgattgaattgctgcaatttcataataaaactaatggatgaggagttgtttcttatgaatatcaaagaaaatagtttcttgagatgaaatctactcctagtgaagattccataaacattgttgaaatgacaacaaggaatttagattattatataaaattagttgataaagcagtgacagggtttgagaggattaactccaattttgaaagaaattcaaccatgggtaaaatgctgtcaaacagcatcacatggtacaaatgaatctttcatgaaataaagagtcaacggggcaaacgtaatcgttatcttattttaagaaattgccacagccaccccaatcttaagtgatcaccaccctgatcagtcagcagccatcaacattgaggcaacatcccaacaccctctgtattagtccatattcacactgctgatgaaggcatacccaagactgggaagaaaaagaggttcagttggacttacagttccacatggctggggaggcctcagaatcatggtgggaggtgaaaggcacttcttacatggtggcaacagaagaaaatgagagggaagcaaaagcagaaaccgctgataagcccatcagacctcatgagacttattcactttttttctattgattggaatagtttcagaaggaatggtaccagctcctccttgtacctctggtagaatttggctctgaatctgtctggtcctggactttttttggttggtaggctattaattattgcctcaatttcagagcctgttattggtctattcagggattcaacttcttcctggtttagtcttgggagggtgtatgtgtccaggaatttatccatttcttctagattttctagtttatttgcatagaggtgtttatagtattctctgatggtagtttgtatttctgtgggatcagtggtgatatcccctttatcattttttattgcatctatttgattcttctctcttttcttctttattagtcttgctagtggtctatcaattttgttgatcttttcaaaaaaaaccagctcctggattcattgattttttgaagggttttttgtgtctctatctccttcagttctgctctgatcttagttatttcttgccttctgctagcttttggatgtgtttgctcttgcttctctagttcttttaattgcgatgttagggtgtcaattttagatctttcctgctttctcttgtgggcatgtagtgctataaatttccctctacacactgctttaaatgtgtcccagagattctggtatgttgtgtctttgctctcattggtttcaaagaacatctttatttctgccttcattgagacttattcactatcacgagaatagcacgggaaagactggcccccatgattcaatcatttccccttgggtccctcccacaacacgtaggaattctgggagatacaattcaagtttagatttgggaggggacgcagccaaaccatatcaccctccaccagcaaaaagattatgactcactgaaggctcagatgattattggcattttttagcaagaatatttttaaattaaggtatgttcatctttttttttcagacataatgctattgcacacttaataaagaacaggatactgtaaacataacttttttttgacacagagtctcactctgttgcctaggttggagtgcggtgggtgtgatcttggctcactgcaccctccgcttcccaggttcaagcaattctcatacttcagtctctcaagtagctgggattacaggcatgcaccaccacgcttggctaatttttgtatttttagtagagatggggttttaccatgttggccaggctggtctcgaactcctggcctcaagtcatctgactgctttggcatctcaaagtgctaggattacaggtgggagccactgtgcctggtcaatagtgtaaatataacttttatttgcactggaaaatccccaaatctgtgtgactctccttattgtgatattcactttattgcagtagtttggaaccaaacccacaacatctctgaagtatgcctgtaataggcatttgtgaatgtggtctctctctcgttctctctctctctctccccctctttccttctctttctccctctcccttactctcaaaatatcttattgtactgtactcatccttcttcttgtgatgatatgagatgataaaattgctatatgatgagaagaagtgaggtgaatgatgtaggcattgtgatttaatgaaaaatgccagaaaaaagcagtttgtaagttttaaattgcatgtgttctgagtagcatgatgaaatctcacgctgtcctgcaacacaggatacgaatcattccctttgtccatctattctacctgccggctagtcccttagtggccatcttgatgatcagatctactgtcacagtatcacactgtttttgtacaagtaacttattttacttaatcatagccccaaagggcatgagtagtaatgtaacattttcagactgtggctgaccaatggcaactggtactctggaaagagaaaccacagataaaggggaactactgtactcagggcctcagtctgaactcactactggtgcagtgaaaaaacctcaaacagaaaatttaatttaaaggagtctcaagttagtcatttctcaagtgagtggaagaaacaaagttaaatccttcctttaagaatttgacttgcacctatgatgtccattaggcccaccactagacatatgtggctatttaaattttaaacaatgaaaataaaataaaattaaaaattgacctctttagttgcaccagccatatttcaagtcctcaggagacatatgtggctaggggtgaccatattgaatggaacagatatagaatatttccatcacacaaagtgttcttctggacagactgaccaatagcaatagattataagatgaaacctgatttccaagacataagaagaatatgaataaaatgtgtgtcttagactcaatgaaatatagtagatgtagagatagggagataaaaacctctctttgggggctcagcagataggagaatcaggctgctgattaggacaacatcagggtaccctgaagttctaaatcatggagaattcctctccagccacctcagcttcgagagaagtctgaagccacttggactgtgagctcactgtgtgtgactaactggggaattagcatgaaatctcattacttggatgacctcccaggcctttacttctgtggaaattacaattgcatgcagaatgacatattttcagatatcttttttctcagaatatggctacccttgaccttttaaaattaaatccattttttataaagtcaccataaaatcattagagttaatataatcattttctgaatcccaagagaagacaaaaccagttgaaattccagagtaaaacattttaaagagaaattttctatgtctttagctttccccaatccaatccccatcctttgacatgtctctccggggatttttggttttgattgaaagttttgtatatagtagttttatgtgggaaaggtacagggaacttcagtaggcctagaaaatggagctactggtttgggtttgcacagtttcaaaccgaaaaaagacttaataaacaattcaattcaacaatgaaatatttaatttaatgagaaattactttgtgactctgtatttttaaattgctacctgtttttctcccagttcaatgtattaccttatacggaaaaccggaaattattaacatttttctttttcttcagttaataataagggatcattgaaatatggtccccatcacaaagtgtattttaatgagagaattgcctcttataatactaaatagtatttagtattgataaaacattgaagtagtagtttttgtgtgggggaaatgtaggaggggttgcaggaggagagaaactggagatgaatgggagagttgtggaaggagattttagattttttgagggcctactatgtgccagttctgtgataggtgctttacacgtaattatcccccctccccaacacttttttcttttttctttttttttgagacagagtctcactctgtcgcccaggctggagtgccatggcaccctgtagtcccagcttctcgggaggctgaggcacaagagggaggctgaggcacgagaatcgcttgagcccaagaggcagaggtttcagtgagccaagattgcaccactgcgcacgatcttggctcactgcagcctccgcctcctgggcgcaagtgattctcctgcctcagcctcccgagtagctgggattacaggcgtgcaccaccatgcctggctaatttttgtattttcagtagagtcggggtttcaccatgttggccaggctggtctcgaactcgtgacctcaggtgattcacccaccttggcctcctaaagtgctgggattacaggcatgagccactgtgctccgcctcattattcccattatctcatgcaaccctatgaagtagattattaccttcagcttatgagggaggaaactaaaactcagagaggctaagtaccttgccctaagtcactcagtcagtaagtaacagcgtcagacttttgccaacaccactctgttgaaattactcttgttaatatggggtcttttcaattaccccacaatggtaaattcaaagagcaattttcagtcctcatctttgttgatctatcaacagcattgacaaggctgatgaattcctcctccttaatatactataaatacttgcctttcaggacataagactatcctgttttttcccccagtattactagacacacaccttagaattatctgatagatacttctcatctctttgaactcctactaagccatgccccaaagctgagtccttgagcaccttttcttctcttatgctcaggccttaggtcaggttttctcagtcttggtactgttaacatttcggtcctataattctttgtggtaagggactatcctgaacattacaaggtgtttagaagcatcactgatgtctacccactagatgcccatagcacttgccccaagcaccccagtggagaaccactgacctagatgatcccgtatctctccagtccagacctttcccctgaactgctgtctactctaactctccatttctggtgcctaacatttgggtcttctaccccaaacttgatccacctgcagtcctccccatctcagctaatagtatctctaccttccagttgctcaggctaagatttctctctcctgcactccacatcaaatctttcaggaaatcttgttggttttactttcaaaatatatccagaatctaattccatctcaacattttcaccactacctccctagtccattctaccatcatttcttgcctgaattattgcaattagctttctatctggtctctttgcttccatcattacctctctaaaatttcattcacctccttaccccacccccatccctaccacattataggtacccattgtaaggtagaagtacctattcttctcaaacacacagaaatctttataaaagttgacctctggttaggactagactaaagagccggtctcaaaagtcaaagaagcatatgaggcagaccatgttctgtgactattactactaaataaaaacattgattttttaaaaacaactgaatctctaactaaaaattttttgaaagtctgctgtctaagtaactcataagtgaagacataattaataataatggaaacaaaaattacttggaactaagtgacaataaagataagtattagaatttgtgtgatatggctaaaagtgagccatcaatgaaaatttaaagcctgaaacatttgtactcgttatgaagaaaggctaaaaattgataagccaaatgttcaatgtaacttttttatttttaaaaaaaagaacagaataaacccaaagaaaggagaaagaaagaaaaaaattggcagatgattttggttcactcccctttcccttctttatttagaatcattgttttataatattatttgtaaaggctgaagaggattacattatttaaattgttctactattgttgttactactcacctatgttggccatttcatttataaatatgaacatatataattatttccatagaacaaatttttaagaatagaattgtggagctaaaaaaatgcacatgcttaaggcatttgatatatttggggattgggatggttagccatattgatctcaattaattttggagattatactgcaacccttggtacatttaataaaaatatactcttattctttatcttactgtttgtgtgatataaaaatgtatcttcactcccaacatgcatacttatccttcaggtattggaaacacatttaatagtcatataaactgcatatgctgagcatccattcactgacttaataagtttataatacataaatgccaagattggcaaatattttgccaaagctttatccataggaaatctagattagaaataatacttcactttgaataatttcttcaggtgtagctgtcagaatcaatgaagaaagtaagtaatcaaactcatttatcaacacaatccaattctgcagaacatcagccagcaaaataattctagagacaattaaacctaggtctccagtttagaggccagtaatatccagtaacttcatagtctgttcttatttgcttacctccattcttgaaatgaatactttagattgggtaaatataattacttccaccttgaacctaaccagaccttcaatattctcattcttgagtctgacaatatctcataactggaaaggagatgagaggataagaaggtaaaaattgaagcaatgttctttcagaattcatgtgagaaactgtaaagcttaaaaaatttttagttatgttttaaaagagactatcctaggtcttatgtcactacttcataagctgaaatcatcctaagtggaaaatggggggattcagtgtctttccttttggtcgaggaaattaccaaacacttaaaaacatctgaaaaaataaattaataacacatcaaatggtactcagatgcagtcacatatgatcttttaaagttcaaattatttcatttatagcttatccctttgaaaaacttgattatgacaggtctttgatcggtgacttatggctcaatcataaggatgaaaaataaattttgatttttggaatgcttttccatgatttctgtagaagagcatttgtattttccacgatttttctcaaatttgggttcagtaacctcttcccacttaaaatagatttctaagagctgcagttgtaaaaagtctcggaaaacctgcgggtcatagaatgacttaacacccatcataaacagaaggctcctaactttgtcacactattctaataaatgatttagacataatcacttttggagtggtcctaaaagtgccctactaatgtttaaaaagactattctaggtttatcaatttctaagttttctaaatactattcaaaagtatacaattacctttctacttaatcaacattgtgtaagatattagatcaatatatctattcctatgctgtctaatagggtagccactagccacatgcagctctttaaatgtaaattcattaaaattaaataaaattaaaaactcaattcctctgcttccactagccatatttcaagtactcaatagcaacacatgtcttgtgatagccctattggactgtgccaatattaaacattctgttgaatgcagaataggacatcacgaaaattctgctacacagtattatctgagacacatcaatctaatatcctgcatacagaccaaacaggggagagggatgaagatggcagacaggaggcaagactagcttgcagctcctgcttgcatagacagtgcagtgtatggagacttataccgtgaacttttgctccaagaactactgcaggcactttgggaggccgaggcgggcggatcacgaggtcaggagatcgagaccatcccggctaaaacggtgaaaccccgtctctactaaaaatacaaaaaattagccgggcgtagtggcgggcgcctgtagtcccagctacttgggaggctgaggcaggagaatggcgtgaacccgggaggcggagcttgcagtgagccgagatcccgccactgcactccagcctgggcgacagagcgagactccgtctcaaaaaaaaaaaaaaagaactactgcaggaacataccagtaaagccaagagaatccacagaccctttgaaggaactggatcactgctgcaggctccctgagatgccaaaaaactgtgactctgcttgcttattggcagggaggcttgtggtctggggcaagttcttagccctggtcactgactgcctgaaaatagacttggtgctgttgagcggggttgcttggtaagtgtgagaccggcctttaggattgcaggctccatggaagcagggtgaagcctgtgactgctgtctttcctctatttctctggtgacctgtttgactcagcagaggcagccataatccccctaggaatataactccaatggactgggaaccacacccccatcacccacagcagctgcagcaagccctgcccaaagagaggctgagctcagacactactatccctgcccccacctagtggtctttctctaccttctgtggtagctgaagacaaaggtcatagtctcttggaagctctgtggccctgcacaccacctgagaaactttaatacttgaccaggtgtccctagggcaagtttgcatcctccctataggaccgcagctgatgcactcttgaaagcgcaacctcctggctggaggccaatcaacacaaaaccagtgcactaaacaaaaacacaactaaggaccctgatagagtccacttctctcccctgctacctccaccagagcaggtgctagtatccatggctgcaagacctgaagatgaatcacatcacagggctctttgcagacagttcccagtaccagtaaagagcccagtagctctgctgggtggctagacccagaaaagcataaacaatcactacagttcagctctcaggaagctccattcctaggggaaaagggagaacagcacatcaagggagcacccagtgggacaaaagaatctgaacagcagcccttgaatcccagatctttcctctgacatagtctacccaaatgagaaggaaccagaaaaacaattctggtaatatgacaaaacaaggttatttaacacccccaaaagatcatactagtttagcagcaacagatccaaaccaaggcaaaatctctgaattgccagataaagaattcagaaggttgattatcaagctaatcaaggaggcaccagagaaaggtaaagtcgaacttaaagaaataaaaaacatgatacaggatatgaaaggaaaattcttcagtgaaatagatagcataaatagaaaacaaccacaacttctggaaatcaatgaaatacttagagtaatgcaaaatgcactggtaagtctcagcaatagaatcaaatgagcagaaggaagaatttcagagctcaaacacaagactttcaaattaacccaatccaacaaagacaaagaaaaaaaattttgttaatgaacaaagcctccaataagtttgggactatgttaaatgtccaaacctaagaataattggtgttcccaaggaagaagagaaatctaaaagtttggaaaacatatctgagggaataattgagaaaaattttcccagctttgctagagatctatacatccaaatacaagaaactcaacacctgggaaattcatcacaaaaagatcatcacctaggcacagtcatccagttatctaaagtcaagatgaaggaaagaatattaagaactgtgaggcaaaagcatcaggtaacctataaaggaaagcctatcagattaagagcagatttcccagcagaagccctacaagctagaagggattggggtcctattcttagcctccttaaagaaaaaaattatcagccaaaattttgtatccaatgaaattaagcttaataaatgaaggaaagatacagccttttccagacaaacaaatgctgagctaatttgccactaccaagtcagcactacaaaaactacaaagggagttctaaatcttgaaacaaatctttgaaatacaccaaaatagaagctccttaaagcatatttctcacaggacctatatagcaataacacaatgaaaaaaaaaccacaaggtattcaggccacaaatagcatgatgaatagaatagtacctcacatctcaatactaatattgaatataaatggcctaaatgttccacttaaaagatacagaatgccggaatggataagaattcaccaaccaagtttctgctgtcttcaggagactcacctaacacagaaggactcacataaacttaaggtaaaggggtggaaaaagatattccttgcaaatggacaccaaaagtgagcaggaatagctaaacttgaaagcagcagcagttaaaaaagacaaagaggtgatagtataatgataaaaggactagtccaacaggcaaatatcacaatcccaaatatatatgcacctaacactggagctcccaaagttacaaaacaattactcatactagacctaagaaatgagacagatggcaacatatagtgggggactttaatactgcactgacagtgctagataggtcatcaagacagaaagtcaacaaagaaacaatggacttaactataccctaaaacaagtgtacttaacagatatttacagaacactctacccaacaactgcagaatatacattctatttatcagcacatggaacattctccaagatagaccatatgataggccccaaaacaagtctcagtaaatttaagaaaatcaaaattatatcaagtactctctcagaccacaatggaataaaattggaactcaactccaaaaggaaccctcaaaacgatgcaaatatgtggaaattaaatagcctgtttccaaatgatcaacaatgaaatcaatatggaaattaaaaaattccttgaactgaacaataatagtgacacaacctatcaaaacctctgggatagagcaaaagcagtgctaagaggaaagttcatagcattaaatgccacatcaaaaagtctgaaagagcacaaatagacaagctaaggtcacatcacatggaactggagaaacaagaacaatcgaaatccaaacccagcagaagataataaataaggaagatcagagcacaactaaataaaactaaaacaaacaaaaaatacaaaagataaatgaaacaaaaagttggttctttgaaaagataaataaaactgatggaccattagcgagattaaccaagaaaagaagaaaaaagatccaaataagctcaattagaaaaaaattggtagatgttacaactgataccacagaaatacaaaactattcaaggctactatgaacatctttacatgcataaattagtaaaactagaggagatggataaattcctggaaatatacaaccctcctagattaaacccggatgacatagaatctctgaacagatccatagcaagcagtgagattgaaatggtaataaaaaattgtcaacaaagaagtccaggaccagatggatttggacctgaattctatcagacatccaaagaagaactggtaccaattctattgacgttattacaaaagacagagaaagaaggaatccttcctaaatcattctatgacgccagcatcgccctaataccaaaaccagggagggatacaacaaaaaagggaaactacagaccaatatccctgatgaacatagatgcaaaaatcttcaacaaaatactagtgaaccaaatccaatagcatatcaaaaaaagataattcaccattatcaagtgggtttcataccagggatatgagatggtttaacatacataagtcaataaatgtgatacaccacatgaatagaattaaaaacaaaaattacatgattatctcaatagatgcataaaaagcatttgacaaaatccagtatccctttatgattaaaacccttggcaaaagcagcatagaagggacacatcttaaggtaataaaagccatctatgacaaatccacagccaacattatactgaatggggaaaagttgaaagcattccccctgggaactggaacaagacaaggatgtccactttcaccacttttattcaacaaagtactggaagtcttagccagagcaaccagacaagagaaagaaataaagggcatccaaatcagtaaagaggaagtcaaactgtcactgtttgcagatgatatgattgtatacctaggaaaccctatagatgcatccaaaaagctcccagaactggtaaatgaatttggcaaagtttcaggacacaaaattaatggatacaaatcagtagctctgctatacaccagcagtgaccaagctgagaatcaaataaagaactcaacccctttcacaataactgaaaaaataaaataaaataaattacttaggaatatacctaaccaaggatgtgaaagacttctgcaagggaaactacaaaacactgctgaaataaaccatagatgacacaaacaaatggaaacacatccaatgctcatggaagggtagaatcaatattgtgaaaatgaccatactgccaaaagcgatccacaaattcaatgcaattcccatcaaaatacaaccaccattcttcatagaactagaaaaaacaatcctaaaattcatatagaaccaaaaaggagcctgcatagccaaaacaaggctaagcaaaaagaacaaatctggaggcatcatattacccaagttcaaagtatactataaggccatagtcaccaaaaaagcatggtactagtataaaaataggcacatagacacatggaatagaatagagaacccagaaataaagccaaatatttacagccaactgacctttgacaaagcaaacaaaaacataaagcagggaaaggacactttattcaacaaatggtgctgggataattggcaagccacatgcagaagaatgaaattggatcctcgtctctcaccttatacaaaaatcaactcaagatggatcagagacttaaaactaagacctgaatccatgaggactgtagaagataacattgggaaaacccttctagacattggcttatgcaaagacttcatgaccaagaacccaagagcaaatgcagcaaaaataaagataaatggatgggacttaattaaaccaaaaagcttctgcacagtaaaagaaataaccagcagagttacaagcaacccacagtgggagaaaaatcttcacaatctatacatctgacaaaggactaatatccaaaatctacaaagtactcaaacaaatcagcaagaaaaaaaaaatcccatcaaaaagtaggctaaggacaggaatagacaattctcaaaagaagatatacaaatgggtcccaagcatatggaaaaatgctcaacatcactaagtatcagggaaatgcaaatcaaaacaatgcaatgcaataccgcctcacatctgcaaaaatggccatgataaaaaaataaaaattgattgattttggtgtggatgcaatgaaaagggaacacttttacactgatagtgggaatgtaaactagtacaatcactctggaaaacggtgtggagattccttaaagaactaaaagtatccttttgatctagcaattctactactaggtatttacctagaggaaaagaagtcattatacaaaaaagatacctgtacatgcatgtttgtagcagcacaattcgcaattgcaaaaatatggaaccagccccaatacccatcaatcaaccagtggataaattgtggtatttatatataccatggaatactacttagccataacaaggaacaaaacattggcattcgcagcaacctggatggaattggaggctatcattcgaagtgaagtaattcaggaatggaaaaccaaacatcctatgttctcattcatatgtgggagctaaactatgagggcgctaaggcataagaataatacattggactttggggacttgggggaaagggtgaggggtggcgaggaataaaagactacacattggatacagtgtatgctgctcgagtgatggttgatgcaccaaaatctcagaaatcaccactaaagaatttattcatgtaaccaaatgccagctgttcccccaaaatttattgaaataaaaaataaaaaaatttaaaaagactaaatagtgttcagaatattcaaatatctccagagaccaggaaggtaatatacatgtgcaaaacagcatggtgtaagactatagagaaatttgatgtcagctgaattggacagtaaagagtaaatgttccatcaagaggaatacctgcctgcctctggcagcatctcccctaaactttgtgctctttttttcagccaggccctgcagagccctaagaacacttctgctaatttaagtaaaaccttggaccttgaaaagttattatcttaccttgtcttccaggtaaaataatagacttaaaattaaagtctacttgtgaaatcctaacacaattttatgcattaatggctgatatggtttggcagtttccccactcaaatgttatcttgaattgtagttcccataatccccacatgtcatgggaaggacccagtgggaggtaattgaatcgtgggggcagttacccccatgctgctgttctcataatagtgagaaaattcttatgatatccgatggttttataaggggcttttccccctttgcttggcacttccctttgccgccatgtgaggaaggacatgcttgcttccctttctgtcataattgtaagtttcctgaggcctccccagccctgcagaactgtgagtcaattaaacatctttcctttataaataaccctgtctaggttatttcttcatagcatcatagaatggactaatatagtaaattggtactacagagagtggggttctgctataaagataccccaaaatgtggaagcagctttggaactgggtaaaacgggcagagattggaacagtttggagggctcagaagaagacaggaagatgtgagaaagtttgaaacttcctagagacttgttgaatggctttgaccaaaatggtgatagggatatggacaattaattccaggctgaggtggtctctgacggagatgaggaacttgttgggaactggaataaaggtgatttctgctatgctttagcgaagagtttggtggcattttgcccttgccatagagatctgtggaacttcaaacttgagagagataatttagggtatctggtggaaggtatctggatgtgagtcatggagtcaaaggggatcattttggaactttaaggtttaatgactgcccttttggattttggacttgcatggggctggtagcccctttgttttagccaatttatcccatttggattgggtgtatttacccaatgcctgtaccctcattgcatctaggaagtaactaacttgcttttgatttcataggctcataggcaaaagggatcagatgagactttggacttggatttttgggttgatgctgcaatgagctaagatgttgggggactggtggaaaggcataattgtgttttgaaatgtgaggacatgagatttggaaggggccagtggtggaatgatatagtttggctgtgttgccactcaaatctcattttgaattgtagtttccataatccccatgtgtcatgggagggacctggtgggagataattgaatcatggggactgttacctccatgctgctgttctcatgataatgagtgagttctcatgagatctgatggttttataaggggcttttctccctttgcttggcacttctccttgctgccgccatgtgaagaaggacttatttgcctctccttccgccacaattgtaagttttctgaggcctccccagccctgcagaacagtgactcaattaaacctctttccatataaatcacccagtcttggtatttcttcatagcagcgcgagagtggactaatacagtgcccatttaatagccttttgtaattaaggtacacacttttggcatagtctgtaccattggttctcaagctttagcatgcatcacccagagggcttgaatttctgctttagtaggtcttaggtggagcttgactgagaatttacatttctttttttttttgagatggagtctcgctctgtcacccaggctggagtgcagtggcatgatctcggctcactgcaagatctgtctcccgggttcaagccattctcctgcctcaacctcccgagtagctgggactacaggtgcccgccaccatgcctgactagttttttgtatttttattggagacagggtttcaccatgttaaccaggatggtcttgatcacctgacctcatgatctgcctgccttgtcctcccaaagtgctgggattataggtgtgagccaccaggcatggctgagaatttacatttctaacaagttcccatgtgatgctgacactgctggttagggggattaccttttgaaaaatactactttatgtttttgccaacagttattttcagcttagtccattttccatgtccagattttagatatgaatcacatttattcttatacaagaaggggccatacatacaagaagtgaaaagatcacagaattaggaatgagaagatcttgcctcttaccctaagcaactgattgattctgtgacctcaagcaagtcagtgtcatcctctgggacttacaggaatggaaaaggtctaagaatgctctggactctagataaaattagcaggtacataagaggagcataatcaaggaaggtgaaggaaagctgggcacaatctaaagtccaaatggctttccagtagtggtcagaagcagagaaacagcaagcaattattccaactgtagataatttaattgcaggtcaataaaattttcagataaggaagaggagaccaagagtaatgtcacacaagcaaaaagcttctgatgaactggaactaggaatttactgccaacagagatgctggaggttccaaaccattgttgcctagaagtgaaaaaccggaaaaacttggaagactgaaatggttctgcaaactgaaaggatacaagatgtcttgaattacattgctgttattgccactatccatctgtgatgtccagactaacatcgtacctaccttgaaatgggactcatcctttagaacaaagagctggagttagttatatatttttgaagacctcattataactagttacagataatatctctgcatcttttatgtttggccatttttttttcttggaaacactgactctctgcaggaggggctggtgcctcagagaacacaagtatgtttcatttcatctgatgtctcaccaacaaaacatcttaattatctatcataacatctaatacaggtcactttggccatgcattttgactatttattatatgctaagtgtgttgttttcatttcctcctttaattcttacaactctatgggacaggtactattttatgcccattttattaatgatggaggtccagagaagtaaagtattttaactataaccatataaattttaaaagatccaaagtttcaaatacagagttttgataaagtaagcaattcattgatttttttattctttgaagtctcaagagcctttgtggcaaatatctgactgccctgattatgtggccctgactcccaataatgcatttctaaaataacaggtcccttaaagggatccaaagtcctttttagactttctcacttcctgaaaaaaggtaactgagaagtggctaggggcaggcattaccatctttgtaggtaatgtagtttaagcacaggaaggttatttgtctaaagtcacaaagaggagtttcagaattgtgagtggagccctcaccttgaccttggagaaaggctcaggaggctcaagaaactatgcatgaaaggctttgcttttcaactgttgcatagtatccaatttctaatgcaggggttactttgttcagaaagtgcttagaatcttactctgtgattcactaaggacacaaactgctgaaaaaaagtgacaaactatacacaaacagaaggaaaataatagaaaatctgtcatttcatactggtctaggatactgaagagttctagttacatttcttttaaaacatacaatgtaccaagaattatgagttaggccaaaggattcttttccccttccagagcaacatatttttttcttcctcttctgtaaaatgaatcaatatacaaatataatttcctgttttcataactttcattgaaatgacctactctgtgaaacaaaggaaatcctttcccctacatatagggaaaatactcacatacatatagcagaaaactatatagttttctcaccacagtgaggaaaagctcactatatatagcagaaaaacacaaggttgaattctgtcctctggaaacctcctcaaaaaacctcccccatgtttctaaggtccaacacatgttgcagggctaaattcagaaagagagagtcctgctgaggacagtcacagcagacattctaaaataaagagtgtaattggattgtttgtaactcaaagggtaaatgtttgaggggatggataccccattcttcaagatgtgcttatattacattgcatgcctgcaacaaaatatctcatgaaccccataaatatttacacctactatatagccacaaaaaattaaaaataaaaaacaatgctaggaatcaaatgagctggttgaagaaaaagagatacataagcatgtcaggatgaggacaagctctgaaaagttctaggcatccagtgagtacagttaggtaccatctctgggctctgttgctgctagggaatatctttgttaccttggaaatcactgtggatcatgcagagcatttactcacagatggtaccattctgccatctgaatcaccagcctctagtcttggggagcagagcagagataggggaagaggggcattctactgtgcctgcagctgtcttatagttactgtgcagattcagaggtaactctgaggggtaaaatagctcctatccactgtcaagatactgctttggccaggcagaaggttctatattgcaaatcagagctgaagtgaaagacggagcctgagaaatgctagtaagcaagcagccaactgaagcttcctgattgtcatcttttaagcctttccttttagaatacataagatatatctcaatacctggagacgctgtgagccatcccagtaaatcttactgccaagggttactgtagaaactgcctttgttgatttctacagacaggaccaagttaccaggagaaccccaagaactgtgtaccagctagtggagaagagcattggcaaaggaatgtaggacgtggaaggaagagaagcctggttatcagattccaccttttgcctgccctccaccgtctctaatcttgccatgtcctttctttacctttgccccatctaattgtccagggaacagatttttggatctaagaataggggcacattgtcagattcatatgaagatcctagaggaggtttgatttttagcaaaaagcatggactttggagttagttggcctaggtttgaatcttggtcctgatctttctagttacttgatcttgaggctctctgagtaaaatggtgataacaaacctaccctgcatggctgatgggaaaaaattactcaaaatagaaactggagaggaattttgattctctactttcccttttaccctttcccacctggtctctgggcaataacatttcctaccaaatttattgcttaaataagtctccaaatgactcctttgctcttttatcctcaatgtgactgcatttcaggcctcttcatctcttgtctgaaccacagtagcactctgtttttcttctcttcttcaagtccatagaaccagattaactatcagaaatgcagctctgacaatatcatttttctcccccatcccaggataggtgctctaaggatttttcattccctatcatttcttcacttaaaatttaaaataagtctgtgtggctgggcatagtggtttatgcctggaatcacagcattttcagaggcagaggaggaaaaactgcttgagcacagagttcaaggccagcctgagaaacatagtgaaatcctaactctacaaaaaacacaaaaattagccaggtgtgatggcatgcatctgtagtcccagctacttgggaggctgaaggtgggaggactgcttgagcccaggaagccaaggctgcagtgagctgtggttgtgccacagcacttcagcctgggcaacagagcaagaccctgtctcaaaattaaatacataaataaataataaaaacctatctgcttattcatggacatcagccttccccattacactttgaatgtcctgatgatagagatattcatctccatatcctaagaacctagcatggtgcttcatagacagtaggtcttgaaagaagatttatatatgactgaaagaatgactacatatttaatgtaattaagacagatggtacttaaaagatattcagcaattacttataattgttaaagaataaatagtttaaatatttgaaattgacatggttctgaaaattccagctctgcttcttgattataaattttttcatgtggctatcttggaatacagtagacaatctaagatttgtagaatgaatgagtgaataagtgaatgaaccaacgctatgaaataagggcaggtactattatctccatttgattactaaagaaaatgaggcccagggagggtgctactaagctctggaccatgcccacagaagcccaattcctgtaagtaggtggaagaaaagtcctgcctgtcttcctgtcattccagttcagcaaaagtctttcttattagaggaaaatggcctccagcaaggcaagcatggaaaccaagcattttcctccttaactctatgtccctgggtttggttagtaatgagtttgcaagacctgagacctggaaacacatgaacaacaggtactcaaatagctgtgcccaggtgaaaaatttatttgtgaaaagcagcagcttttggtactttgttccacagtagaatgaaaggaaagtcatatcaaattgcttctcagaatgacaagctccattaatattgaagcagtcaactgttagaactttatagtcaggtaactttacagtcctgatagatggttctcacacagattcttctcgtgtgtaagtaacaatggaacacagaacccactgttgtcactgaagagctacaggtcctacaatgcatcagtgctgaagtagaagaattcaggacagtaaattagcagaaacccaggagaaaaagctagttcctattacgagaggcaccagcaggggagggcggccatgtggaaatagttttatgttgtggcacactatagggccagttggatgcaacaatcacaacaataacaacaaaaggaagctagaagaactggctttattctttctaatctccaggctgacgttcaagtctcttgcctttcacttctaactgtgagagctggggcaagtcacttaagcctgctgagtctgtcacttcactcccaaagtggttacagaaatatcaattcttatagggtttggaggaagatgaaacgagatcttgtgggcaaagggctaaaagagtgcataaggtatgcaaaacctaaggggtacaaaagaccctctattggtctattagttttatattgctgtgtaataatttaccacacaataatggcctaaaagaaggcccatttgttatctcacactttctgtgtgtcaggagttcaattacaccgtggctgcgttgtgtgcttagtatctcacaaggctgaaatctaggtgtcaggtaggctgcattttcatctgaatgcttgactagggaaggatctgatttcaagctccctcaggttattggcagaatttgtggctgtactattcacggtggcttgtttcttagaagacagacgctgagagacagagtctctgttgcttggagtttctgacttcagggaaagcctaggccatcttttaaagggcatatctgattaggtaaggcccactagtataactgccctttaattagatataattcaagtgattagggatattaattacatcttcacctcttccatacaaccatatatgacataaaaaataatcacaagaaagatatcccatcacctttgccatatctattgcttagagagttacagatcctgcccacgctcaaggagagggaattacacaaaaacatgactactagagggtgagagttataggggccaccctagggtgtgaccatcataatttaggtgaaggaagaaactataagcactttcatctgtattattttttaaccatagcctttaaaaattctattattgcggccgggcgcggtggctcacgcttgtaatcccagcactctgggaggccgaggcgggtggatcacaaggtcgggagatcgagaccacggtgaaaccccgtctctactaaaaatacaaaaaattagccgggcgtggtggtgggcgcctgtagtcccggctactcgggaggctgaggcaggagaatggcgtgaacccgggaggcggagcttgcagtgagccgagatcgcgccactgcactccagcctgggggacagagcaagactccgtctcaaaaaaaaaaaaaaaaaaaaaaaaaaaaattctattattgcataaaatttaaaacatacatactatattagtataatagtaaatgcttgcaattagtaaaatgtgcctacattgaagggtgcttttattgatagaaatgcatagtaaaaaatggtaaaccatttcaaaccacatctctttttcccactttctcttcccacctttgctagttatccatgatatcctgtgtcagttacttaatctatgtctcactttcttcatctgtaaaattagaatattaattcctgtgctatttcctaggtgaggctctgaagagaaaatgttgaggaaagcattagaaaatagatacagtttataaaatgtaggcagaaaggcaaaagagagtttttattacttctgacttcagactcagaaaagcaagaaagaatccttcaaagggccttcccctttcttcccatacataatttctcccacatatatgcagggtcctcctgagatattttaaacactatggggctctctgagcttttattaaaagcttagaaaaaccctcgagacctctttttcccaactgtccacacctaagggcacttcacctgaaatgtgttgggtgatattaaatctcaggaaagtcgttggtatttcttctcttcctttttcctttcattactgaagatgatagataaacacatctactattttgtttttctcctgccttagaagatcaattgaacctgtttcctcatttagcctacatatcagaatggtagttttgaggaagttagtgtggcctgacagaagaaacacaaggctttaggaagtcttaggagaaaggactttagagttaaacagacctgggcttcaggttcttccctcaagaggtctgcaaatattcaggaacttactcagctctctgattttcagtttccttctttgttaaccttgcaattttgttgtatggacagaggggatggaatgtggggtagtacctggcacagttcctggcacacagtaggtacacaatactgtcttaatgctcttttcccttctgtaagtccagatccaagttttagtctggcttctaatgagctgtgtggtcccggggaagtaatttttcctctctggttctcagtttttttcactgggatgataaagttgttggaataccttgaggtctctatcacatgattctaaggagtcctgggcttcaaatcccaacaccggtgtacccagttctacaggatccagaacttacataggcttctcccatgctctcttcgttactcagattgaggattgctgttatcatttttagcttacttgttttaataaatggctgatgaaatcattgccgatatgctttccaaagaaattaggtgcggctgctaagtctcaaatacatacttgattactgtgtagtgtaggttgtctttgcagaatgaacaacagagcaaggtagtatatgataaactcattttagaaagctaataaaaacgtagaaggacagcagccttctctatcagtttagttcatatcaccaagtgactttcctattgccaggttactttaagcctaagtagacactggaatttaggagattgtcaccaggtactaaccaaattgatctgtagtctatttcttaatgttgtctaatatcactatacaaaagtagaatacacttgcccataccgggaaacctctctaggacttttaaaaataattatttccattttgaatttttaaacaggaactagaaagttctcagcaaatataacaaattggcatgcttattaaaaatgtgtgtgtgaattttaaactatatattattaagttagaaaattaaaagccaatttaaaaaaaataaatagctttatgatttaaccactgagaagaatatactgttattagattggtgtttttccttctagtcatacacacacatgagcacttacatgcatgtacacacgcacacttgccatatatttactgacaactcatatttatgtccctgctgagttctcttctctgagaatcaaacttatgtaggcaactgccatgttgtccaactgtcctggttcacccaggactaagtggtttcctgagatgtgggacttccagtgctaaatttgatacaatcctgggccaactgcccactgtatagtctgtagatgccttcaactcagcaaatacaaaactgaattcatctttctcatcccaaaccttttgctccttcagtggtctgattttaaggtatggtaccatttttcatccacgtgaccaatagaagaatcagggttaagtctttcctcttcctctctttatatccaaaggtgatctggtaccaagttctggtcatccctgtttaaaaattaactcacatggattactgataggacttctttttttttttttttttttttttgagacggagtctcgctctgtccaggctggagtgcagtggtgcgatctcggctcactgcaagctccgcctcccggttcactctgttctcctgcctcagcctcctgagtagctgggactagaggttcttgccaccacgcctggctaatttttttgtattttttttagtacagatggggtttcaccatgatagccaggatggtctcgatctgctgacctcgtgatctgcccgcctcggcctcccaaagtgctgggattacaggcgtgagccaccgcgcctggccactgatacgacttttaaccagacctcctgcctccagccttgccctcatgcaattcaaattctacaaaataggcagagtcctaatcccagaaatccaaatatgaccacatcactcctctgcatagaggccctcagtgcctcccattgctctcaggatagaaattaagactccttaacatgatccaaatgttctgtttacctcactaaccttgtcatattttttcctgccctaggtctcctccccaacacgttaaaatgctgcagcattcagcctattaatcacaaacttccaggtctttgcacatgcgttcaagttcttggcttagacacttgaagtaggaagcctactctgaagcctgtaaatatttcatggcctttctattatgtttatgcaacttacacgtcagcagaattttgtgactgaaaaagtcttaagaaacactgagagatcttgtttcagactaggggctgtctccttaataccttaaagaaaaatctaacaagggatttaatgttctcagtctattaagttaagcggtggttctttactttgactgcacattataatcaccttggctgctttttaaaatttctgatgttttggcctttatactcagaaattctatttaactggtctgaggtggggtctaggtaccagtggtttttaaagctcctcaggtgattctaatatgaatccaaggttgagatccactgccttagttttgccactgtggtcccacctggtatttatacatttatttttttccctacctaagattagctatgggcttcctcatctattgttttttttaatcttttattttaggttgaggggtatgggtgtgttgttatataggcaaacttgtgtcatggggatttttgtacagattgttttgtcacccaggtactaagcctagtaccaaatttttttttaatttttttctgctcctgtaccctctaccctcaggtaggccccagcgtctgttgttcccctctttgtgtccacgtgttctcatcatttagcttccacttacaagtgagaacatgcagtatttggttttctgtttctgtgttagtttaaagccagaattcattcacctattgttaatcacaacccaaacatctcccaggagaagcattcctacttgtgcactggggccagctttagcaacagtgaaattatattctgatggccatgttttcaagttctgtttttgtttctcaactggccccaactcaggaaggcatgcgatgaattttcacccttaaatcccaacaaagaaggagagagtaaagatacaattgactagagtagtggttctcaacaagggtgatttggcagtttctagagacatatttttttattaccactgaagggggcagtgccacttgcaactagtggatagaggctcactaaccatactacaatacccagtccagtcccccactgcatagaattatccaactccaaatgtcaatagtgttaatttaagaagcaactattgagagatgactccaaagctttcttcttgccttaaaacactctgggaaagagtctttgagtaattgaattggagtgcagtgggcagataaacttgttttcataaaaaagaaacagtggatgcagatatagagaaattttaaggttgagatgggtgaattgagggaaatgtattgttgaaactgtctcttgactatttcttctatatgaatcatgctttacgcatgaactctgaaccagcagcatcagcatcatctgggaacttgtcagaaatgcaagtcttgggccccaccctagacctactgaatcagagactctggggttaggacccaatgatgtatgtttcaacaagccttcctggagattctgatgttgctaaagtttgatgatattattctagatcatatgctgaccttgtcttaaggtctgttgtggttcgttacatcatatgccttcaagagtcagtttgattattgggagtagcaggggtgattgcatggtaagagagcttatgaagaaggccagctggtctgcagggcagatgagctagaggtaatgcttcctgacaagtccatttagtgattttactctttcatgggatagctgtcatgaaaggttttaaataccggtgcaataaagcatgccgtgtggtcaacataatgttgaagtaaagttaattgccacaggaaatgaaaccgacgtcggggggcaggggggtggagacaagtaggttgtagaaaaagttctgaggatcagaatccaaaggatgctctttcttttctcacccattttaagacttaattgaatcctgtttgtttgtctcacccaccccacatccctcttctactttattctattaaaaatctcattgcttaaaggtaaaccaggatttatcatggttagtactagacttaatccttgctattctaggaactgttcaaagaagcaaagtactaaaccataaaatacgccagtgaaataaaaaggacctgacatttagaaaatccacaaggctactttctttaccttccttttctaagattttaggcctctttcccctccaaaagctatgctgtgagaaccagatgtggccacaatactgtttctttttttttttttttttgtgacttgcattccagcccctcattcctgaaggagtgcttttctctgttggctgctttatcctccagactcttcccttcccttcctttccttcttctaactccctatggctggtggagggaaagttatgtttaaatttaaggaaaaaaaatgttaggagaaaatatggtgacaaatgagtagcaatgggaagttctctgagacatgacaatgaggaaagaaagcttccatgatgaatgtagacttgtcttaaattaaaggaagtgtcccaggtcataactgatgtgatggaaacattaacctaattaacctaatcactagcatcgatatatgtggagataagaatgagtagataagaggggtatttttctaggggtctttaaaaggtgagaccaaatagcaaaaaatctggtacaatgtcatcaatggtatcgagctaatgtaactatgggcttgtgtatatatccatccatctatctatcaatccatctatccatctattcattctttaagcatacatttattaagaatctactatatgccaagcactgttttaggggctgaggatatagaggtgaattacataggccagttcctttcccacggaccttggcacttatatttcagtagaggactcaaactataaacatgtaaacaaataaacaacgtaatcacagatggtggtaagtgccatgaaggagatggtgattagatgaagagtaactggaggaatgtatgtatgaacaacgaagtctgagtgcttcagttttgagttgacacctgaatgttaagaacatgccagctattcagagatggggaggcaatggagagggacaggtgggaatttcaggcatatatcaggatcttctagaaatgtgaactcaggagctacttgagcctgttaagaaaaattatccacaacctgaaaacaagtccgagagtgtgaccgtaagccctttcaatgccatacttaatcattatttaacaggcccatccaaggatgatatattttcctataagaatttaccattatttgtttctgctatttactatttattattaataattgagggctcaggatctgtaaagttatacatgttaaacttgtatatgatgcaatgatttccttctggtgtaaagatgaccctgaagtttatggtttattgcccctaaagacattaattaattttgtatctagaaattttagtcctttttaaagaaaaagactatgtaaactaaattatccaaaatgctcttggagaacttttatcttcttattggttacctcatcaattaatgagttgaataaaatttttgatacatattcatttgatagttcaatgagagtcatacttttaactttttgaaaattatacattgacaagatatactgtggctcacctcaggaattgggagtcagagatcagctttaatgagtacatgaaagcctagaattatctgtatttttttttttttttttttttgagagggagtctcactctgtcgccaggctggagagcagtggtgtgatctcgactcactgcaacctccaactcactggttcaagagattctcctgcctcagcctcccgaggagctgggattacaggcacgtgccaccacgtccagctaattttgtgtgtgtgtgtgtgtgtgtgtgtgtgtgtgtgtgtgtttagtagaaacggggtttcgccatgttggctaggattgtcttaatctcctgacctcgtgatctgcccgcctcagccttccaaagtgctgggattacaggcgtgagataccgtgcccggccgaattatctatatttttaagatcaagcaccttattaacttaatcagatgttccagactcttgagtctttcagtcacaactgctgaccagagtaaacactctccagactcctcatgtgcccttgccttgatttttctatgctcaccaaataacatattttggttgctaattctgcttcaaaagtattcaggtatcaggaaagaggttccctgtatggagcttgataattatagttcttgccaaatttatttatttatattttatttatttttgttttttgtaaattactatgttggcctcctggcttatgcatctgccttttgccgtgagtcagttcttccaggtcccactaagtctgagtgattggacaaagctgagttcctgtaccagcaaagaagctggagactagacccagtgagacgggggaccctgactggagccatgcagcacgagtggcctctgtaggcaacatgaggaggcatctctccatctctacctggtttctctctaaattgcatgggggtggatgtgggattgatgatcattctaactttcttctctttactggaagtgtccaaaagtatttatgctcattttcaatgagctcatgttcccaagaaagaacaattcacacactctcagagagaaaataattcgtttcttatcaggtcagtcaatttgctctttcttgatatttgttttgtgtgctccacacaaagtcctcctggccttccttaatctttttgggaagtataaacactgcagacaggtggggtcttacaggcaccatatctttgaggagatgctgatacctcctccagctcctgagaaggagggcctatgggattgttctgccaagcatctaagaaagggtcatttccctttgcttcaaggactctttctttatgaaagctgatcttcttcctaagagacaggtctcttcatgttttatttgatgattctactgacaatgctttccagaaaaaaagcccaggatggctgcggattgtgatgttttcatctttttcaaacaacattctggtttaatgtttaaaatgtgggagagaagctggatgccctgcagaaactgactcaatgaaaaggcatcttgggatgtcaatccagtttgtgaaaaccttcctgttgacaaggctaggttaaaaacaacatttccaaatgtgcaaaaatgaaaattgagatcttgaggcaactttttcagtttctgtgtgaacaaagtagtggaataaactatagagtatctcatattaaaaatattttaaactaaataaacaatcaagtaagagcaaccagcataaccagtgttaccagaacacagcattatttaaacagagtagtgagtcctgtcaatttgaataatgacacaaaattgcactgggggattctcagaatttctactcagaataatccttcccttcatcattaagcaactttatccacgtcccagttttccccaagtatcttcccagtagctggttagctatccattttcagtgcagaaggggatgcagatggattaaataatgtgaggaaactgcttccagttgcagcaattgcaacttatttagatggacattctctctagtagggaaatgtccagccagataataagagggctacctctttactttcaactagagacctcatcagggcactgaatagcattcatctgatacttttagttttagacttgcaaagtgttttccaaagatgactttttcaaaaacattttttaaaaaaatcaaagacagagcatgaccatggacaattttttcaataaaacagtttggccaggttgtaccatctcttttggcctcttccctcataatggttgggcaaggaaggactgtaccctttgcatgcaagggtttccaaaagggaggaatttgggagtcagaaagaatcgcttaggagctgccataccctcatcccagattgctgagagaacaagagccattataggtaaggtatgccagctttaggcaggcattaaatactctgtagtacaataatgtcaggcagttgtttcacaaggagcaggttcaaagtcatgttaacaggaagaaggctttttctaaatttaatttttgttgtggtaaaagatacataacataaaatttgccatttatttttaaatttacagctctgtggcattaagtatattcatattgtatttcaacgattaccaccatctttgtccagaacttttctgttttccccactgaaacactaactcccaagattctttttaatgtaagatcagtttatatggtttcttggaaacaaacaagcaaactagcacttgctttggcaaggtaggctctctttttagatagtaaggaaatcagatctaattttcactaatgaaaaagttattttgacattgaagcacctagtgttgaccccatttgtacaacagcccatttcttccaatttggagtcactaaagactaggcagaggaggggtcccattagcatcataggcttgacacatgaaggggcagaattttctccttggtggatgggaaggatgatgtgttttgaagaaaaggggatgggataccagaatgggaggactgaaaataagaaggaggcttgaagagaaagagaggagaggttgggaaagaattgctttggccacatgtgggtagtggctactcttttgaagagtacagatacagaatatttccatcatcacggaaagttttattggactttaggttctggtatggagtttaggttccagagtcataaagacttgatccttccaatgccactgactagctctgtgaatttaggctagttatttaatctttgttagtctcagttttcccatttgcaaaatgaggataataagagtgtctccctgtggaagagccagccaattcaccaaaaatctgtttccttctatttctaggcatcctactaggccacatttcctggtttctcttgccatttactgtggctatgtgactgagttctacccattggaatataggcagcaatgctagatgttgttttcagctaaaacttttagagagaggcctcttcatattttttccccttttgcctgatggatccaaacaaaaataagtccctaagatatggatgagccacaagatagaagcaacctgagttactggattacttcatgaaggagaggcaaacattgatataaaagttttacctttgattgttatgtgagcaagaaattaacttctattacacaggggctctttgttactgcagcattgcttaacctagaacaattacagagttcaatgagaaaatttaatcaaagtgcccatcacaatgtctggtacctggtaagtgctcagtaaatattagctgttttttaaatactgaagagcagaaattatagagcaggagagacccaggtttaaactaaagctgtgtaaactaagctctgtaattataagcaatttgcgaaaacacaggttcttaatttcctcacctgtaatataagatgataatgttaatgaaaagaaagaattattaaagttgagagaatatgtagtttttctctcaattcagaagcctgcatgatttaacactatttgagctggctactgctttttcacgctgcagtattgatttccgatttcagtagaggcagcctgctgtactcaggggtgccatttagttaagtggactcaagaattcctgtgctatagctgatccaatatagagacacctccatgagtctgcaatcagataagttccaggacatttaggcagactgaactattgacaggcacaaaatcagcagctcttgagtccagaaggccataaagaaagcacttgaatctgaccagatctccagaaaactcaagaggaccatgagctatccaaggattttttttttcctgttacaaatataaggcacatagagaggacggtgaaattgctttcagttgcctagaaatgccaggttctttgttgcaggtgtttccaacaatgctgaacatagcagtggactcctcaattccaactgcctgtgttttgcaccaataatcgtgaaatgttgatgtaattcatatctaatgattaaagccctttctatgggtttgggggaattatggggctgaattgggatcaatgccaaggattcagatctgggggttggaacttgtcttttcctttccaagcagtaagagctagaaggtttgctagaaaaaaatcagcttgaaacagaaagaaaacaaacatgcaattaattctaaaagattagaggcaaaataagaggcaagtagggacccaggggttaagagtcacatgaggctgggaataaagggggaagttccgaggcaaactctatgagtggactcaaatccatttggcagtagtgtgtcagtctggctcagagaggccaaagcaaagacagtgaatttgtggagaaaatacaatttcaattgaagatggcctggtcacacatgaaataagaaagatatgaatagttggatgtaatcaaaaaacaggtgttaaggatttcttataggaggaagaacagaatgtatccatacacatacacatatacatatacactcagcctcacagtaaggcatcagaaaccgtgctgaactacataagggtggtacctgtagtgagtcagctaggtttggagaatcagtagaaagacagtatttctctttttgcaatctatccatttgacaaaggtctaatatctggaatctataaggaacttaaacaaatttacaagaaaaaaacaaccccatcaaaactgggtgaaggatatgaacaggcacttctccaaagaagacatttatgcagccaaaaaacatatgaagaaaagctcatcatcactggtcattagagaaatacaaatcaaaaccacaatgagataccatctcacaccagttagaatgttgattattaaaaagtcgggaaacaacagatgctggtgaggcttggagaaataggaacacttttacactgttggtgggagtgtaaattagttcaaccattgtggaagacagtgtggtgattcctcaaggatctagaaccagaaataccatttgacccagcaatcctgttacaggtatatacccaaaggattataaatcattctactataaagacacatgcacacgtatgtttatcacagtactatttataatagcaaagacttggaaccaacccaaatgcccattaatgatagactggataaagaaaatgtggcacatatacaccatggaatactatgcagccataaagaagaatgagttcatgtcctttgcaggcacatggatgaagctggaagccatcatcctcagcaaactaacacatgaatagaaaaccaaacaccacatgttctcactcataagtcggagtggaaaaatgagaagacatggacacagggaggggaacatcatacatcggggcctgtcagggggtgggaggcaaggggagggagagcatcaggacaaatacctaatgcatgtgggactgaaaacccagatgatgggttgataaatgcagcaaaccaccatagcccgtgtatacctacataacaaacctacacattttgcacatgtatcctagaacttaaagtaaaaaaacgtaaattaaaaaaaataataaagtaaaaaacttaaaggaaaaaaaaagacagtatttctcaatgtgtgtttggcaaatggcctgtaccagcattgtttatgaaaattgttaaaatgaagactccaggaccactgagtgtgggattctgatttaacagagcacttttctgattgtccaggaatccagctttgggggtgtcagaaggcaactcaagaacatggctgttttaaaccaaccaggcatggcagcctaagatagacggcgcaaagaacaagcgagatgaatcatgggtgaaatgtcattcaggggttgctttagacttgtatttgggcctcctttcaccccttagtgggttcctgggtcttactcccttctactttgactttggggacctgcttcttcttctcttctgccatttcctttactgcaccatgggctcagttaataacctgggcctctctcctacataaggcatgggggcgaattgatccagaacaactggtgctatcaccttagttttccccttcaaggcaaatagctcctatcaaccatactctgatgatgcttgatgaactttgtgtaggggaaagtatccatgttacttgtgtggtttggaaattagagaaagagatagaaaatggccccataatacatgtgattaaatggtctcagggtgcttatatggtgtttgtcaagattgttctggcatgacagttttccacagtgctaggcataattgggttatgaataaatacttgctgatagtaccctctcaccattttcttctctaagaacactctctggaagaatctattctgaacatcaacattgcctcctaaagaatatgttctgggtattaacaatatgttgatcaaatcaaataaaatgattaatgccatatttcctagaatctaagaggtacatatttctgggagagtaatttattttcttataaatcatacattgataagtaagcattgtgttatagttttattgagagactttcctttagtgtctcagaccttatgaaatgttacatatagacaaatcttctgttaaatattagcataatggtaaataaatcattctggttgaaaaggtcaagaaataggcttatcaggatgatttcttttctaataagtataatacaataaaatagaggcagtgcaatctgattaaaacaacattgaatttgatgtttaacaacatgggtttttgagtctcagtttcctcatctgtaaaatgaagataatggaacctacctcacaatgtggttagaagtaaatgaaattatgatatttataagggccttataaactctaatatgctttagaaataatatatattgagtctatcctagaatatggcatgtctaggatgccatagaaagtagtagtgtaatgcctttatgcagttcagaagacattttagcatgttgtggtgttatctcttgggttaccataactagtaaaaatatgatctgaatatttaaggtatttaattgtattgaatatcataggtaattaaggctcagtagacatggctgagaaagcactgagtgtctgatacctttagagttacattaaaaaatgaatcccagccaggtgcattggctcacgcatgtaatcccagcactttagaaggctgagggagaggactgcttgagcccaggagttcgagaccagcctgggcaacatagcaagactctgtctctacagaaaaattaatctctgccagaattaatggggaaacactatagaattttctactatgttcatgaataagacaaggaggccctctacctccactgccatctatcacattgagggtattagaagaaaaaaaggggtaaggataaaaactatctccattttcaagtagtatgattatatatttggaaaaaaacatgctgggcacctataatcccagcactttgggagaccatggtgggcagatcacttgaggtcaggtgtttgagaccagcctggccaacatggtgaaaccctgtctctactaaaaatataaaaattagctgggtatggtggcacacgcctgtaatcatagctactcaggaggccaaggcagggaaatcacttgaacctgggaggcagaggttgtagtgagcctagattgcgccactgcaatccagcctgggcaacagagcaagagtccatctcaaaaacaaacaaacaaacaaacaaacaaaaaacagaaagaaaagagaaaaagaaaaaaagttaatgggaaaatcactataaacaataagagaacaaatattagtttaagaaaaaattcaatgaccttcatttatgcaaacaatagaggttctaagaggtacatagaaaataagagaaaaaatattaagcactcctgcaaaacacaaaaggagacttgaatgaatgaaaagacatgccatattctaggataggaagattcaatattataaagagaaaattctgcctaattcacaagttaaatgcaatctcaataaaatattatcaagttttgggtttttttctggtattagataagttgtttataaagctcaatgaaaaaaacaggtaaaatatccaggaaaacccttaagaaggcaaggaatacggaagtgggtatggctagctgtaccaggtattaaaatatgctacaaaacgtagcatacaaaatatgctacaaaatgaaggtaaaaggtagaagagacaggaatggaagttaatcttttctgaatattccctgttttgcagttttgactttggaaccatgtaaacatttaatataattataaggcaaaattaaatttgaaaaaatatctaaaaattgaaaacaaaatgaaacaaatgaacctgactgttccatgggctataggtccacagagaccttaaatactatggagaggaatgattttgagagacattaaaatatggctctgcatccatagaaatacatatgtaatgaagaaaaagaattgtaaaatttcaaaattgatttaggtcaagaattcattccagaaagcaaggacgttatcaagcaaggacgttactaagtttatatcaaaagaattcaagagccaacttgaagaagcttttattggccaaatatgggacaacttaagatttcaaaggaattataataactgaaatagatggaaacactgaaatatatttaaaaaatccataaattgttaataatactggggcattcttgccagaaaacagaccctgaaatctgatcaagttctaaatatgcatttataggaaacacagaatgtgagaaatgctatgggacaaaccagcctggtttcttcactaagtaaattacagggggaaaaaaaaggggagcgagaacgaactgattaaaggaggcttcagagacatctcagtcaaatacagtgcttagaccttgtttaaatcttcacttaaacaaatagaaacaattgtttaataaatgagagactctggcaaacataaacaatggcagaatatttggtggcattaaggaagtatagttagcattcttaagaataatgttttatagttttattaatggaaagatttattatctgttagcaatgttagcaatacatactgaagtattttctgatgagatgacaagatgtttgggataggaacacagtgtgactttcattggcacttttgccttcatgggccccttttaacacaacagattttcatggaccctaaaaagttcgttgctttctgatgcaagaaaaaaaaattagaatattttagttaatcttacatgttcattctcttcttctgattttgaaagaaattaaaacattttcataggttcttgaggagtttaacaaggctcccaggtgactctaatgtataataagtttgatgtactataccagtggttcttaactggaagtgattttacactctagagaacatttggcaatgtctgaatacacttttgattttcagactgacacaggcagcagggtgtgtgagtgtgtatgtgacgggggtgaaatgctactggcatctagtagctagggttgctgttaaggatcctacaggcacaggacagctccccacaggaaaatccaaacgtcaatagtgcacgtgtggagaaaccctgatccttctctcccccctcccttccttcctttttctttcctttcttctttttttccttcttttcctctattcttccttctcacattctttctttctctcctctatcatctatcaatcaatcatctatttccttacctcctacttatttctctacaggcagcagagcactcagaaagccacaaagtgttccttttctgcatttttatttattcaattacagatgaccctctccttttatcctcctcataaaaagtttaatgactcctcataaaaagtagatatatggctaaaggaggtattattttatttctggccaaagagggtcatttacctccctgggaataggagggtgctactcaacgtgtaagtgataattgccatcctatgcctgaagtcacagctcttggccattctgcataggagcttccacatgaaggaccaaatagccaggaatcctgattttggcttgaaggtttccagtggggttgaggcttgaaatatctcagttcttacagagataccaggtgcaactctgagttgctcctcaagaacatggaagtgaacatgtctgctaagagttcaactgcaaagctcatacagaatggatttaagcaaagacatataaagcaaccttaaagagcttgagattaaccaatcagatgggattctaacctgacagatcatatcaatgaatcaaaaaattgtatctgtcagaaggtttgtggggcaaaagtagtgaggaaaatgtaaaactactaaggcaaacatcatcaatgtccagctacccagctaacactttccaggggattagttgtcctgagaagtcaacatgaatgtttagtctgcctgatggacagtggaggtgggcactcctggttttcagagtctgaagccattaactgtctcagttacccaattctgatttcaggcaataacagcaaccttctgatgattgtcttctctgtggtttgcccacaagaaaatgccctggtgaagctgatattactgcttgatggttgtgtttttcactgaacattaatcaattggccttttagtttataggcaccagtctccagtagatttgcttagttatccttaattggttgaatcacctccgggccattgacaacaaggaacgtctagactttcaaggtagaggaaaggccagagcatggcctataaaaacatctcctgaaatctgctcctggcgttcagcctactgtcttcctttggtgactttgaatgcatattttcttccaacttttacattcccaaggtgctcagaaagccttcgtgatagatcgaaaaagtggccacgatactttggagcttcttccaccaagagatgtagtctatctccttaccttttaaatctgtaatgaccatgtgacttgctttgacctagactgtggaggaagtgacctgtgtgagttctgagcctaggccctaaagaggtcttatggggctctgttcttgcattcttcgaaccctaagttcactgtgtgtgttagtccaagctggcctggggatgatgagagccatatggccccaccccttctctcattccagaccacagccagccaacctccagaagcagaaccaccctcctcttgggtagctgaccacaaatgcctgagaaagtccaggcaagatcaacagaagaatcacctagattagttcatcccaacttgtcagtactcagaatcataagctaaataaatgcttctagttctaagctactaaattttgcattattctgttatataacagtagataattgatatgacactattttcattttaataactctcatttataacctgaatttattgccatggttttgtctttcagaagacatgggttttgcctcttgatataacataattggaattgattttgggctttcacataagcttcaatggctctagaagaagaaatagcccttgtttcttccatcgagatgctaaaagatgagagggttgggtacagtgtaaagaaaatttggggtttgtcaatattattttgaaaagaaataggaagattaaatactttttttaaaaaatcacatttcttggacacagatttctgacctttagccggcggtctgggtctccgctgcatagagaatttacagatactttgaatgatttccaggctgggcttaagttattcatcacaacctgggaaaagaaagagaggagtggtgagtgggggagaaatgcttgacattttcacatttccacattaaaactgcttgagaaaccattgtgatgcttatgaaaagaacaatagcctggaagaggtgccttaataaaaacttgatgtagtaaatcttttaagggtacccactaagcaggtcattatgcacagaactcctgtggtcactgtcctggccgttgtttcatgaataatgccaataatattttccagcatgtggatgctgagaatgatcccttctatatcaaaaggagttgaaattaaggatagggctgcctttgcccattgatagagaattctcagttctgtaggactgtcagtcttacagtataaattctcttctcttggggtcagcaaaggtaaagactcttagtagggtgaagggtatagcaagacaactctgctgctaaataattggatggtctggtaatctgtgaccttgagtcacatcagattgcaagtcagaagagaagtttctagaagaaaaatcccaggaccatacttatactagcttatcaccaactcaattacaatatcctggaaaggcgtgacaaagcagatcttaagattataaactatgtctataacataggaaaacccttttaaaaccactttactaatcacaaacttggctaatcctggcctaagaatctatatgagtcaaatcttatcttgccataactatggttcaaataattcaatttggttcagaatgtatgagtagctgctctgtgcctagcattgtactgtgtacttgagggcagggattcccaaagtgtggttcctggaccagcaggagctgcatcacctggaaacttcttaaaaacacaaatttctagtccccacccagaactaccgacagacactctggaggtgggtctcctgggtgattctgaggcacaaagtttcagaaccactgctctaggggatatacaaataaagttaaatggaattctgtcatattgatttttctacttaggaagtctttagttagtggaagtcttggaattttttgttttttttttttgagatggatttttgcttttgttgcccaggctgtagtgcaatggtgcaatcttggctcactacaacctctcctgcatcagcctcccaagtggctgggattacaggcatgtgccaccacacccagctaattttgtatttttagtagagacagggtttctccatgttggtcaggctggtcttgaactactgacctcgggtgatccacccacctcggcctcccagagtgctgggattacaagcgtgagccacagcacccgacctagaatttgttttttaattaattatctatccaaataacataattcttttataagtgattccctcttccaccggattccttaatataactagatcctagactcattgttaaatttcttctaatgcattgaagtggagaaataatgtttctgtgtgactttgtcatgtgttctagtacacttaggatgattaaaatgatagcaagaaggagaattaggtaaaaaattgtttgggttaaaataaatttcccaactttatatgaaaatgctaaaaagtgaagaagtctcatgcaacagttttgaaaaactcaatagcaactagaaatttcctctgaagttaaaatctttatgtgtatgtatgtatgagtgtacacatgtgtgtgtgtgtgtgtgtgtgtgtgtgtacgtgcaggctacccacaagtgagcagttttgcctggtatttattttgtatctactgagaaagcaagagaaatcaatgtcatgttgcttcactcatcggaaaaccttgccatcatgttccttgtgaaactctaggagcacctccccattagagtaaaaggggatattatagaaattcttgggaacaggagaatttaccaatatcaatgagaagaatgctctcaggagcagaggagaggaggttctggaagaaaagtacagcaatagtcatcctttcaattttttattttttgggctgttacttcaagaatttatcctttatgttagaaacattccacttatactgttttggttattataaaatatgtaataaattattgttgactgtagtcaccatattgttctgtcaaatactagatcttattcattctaactagatattttgtactcattaaccattattacttccctcctcccctactacccttcgcagcctctgctgtccatcattgtattttctatctccatgagttcagttgtttttatatttaatatttagctcccacaaataagtgagaacatgtgaagtttgtccttctgtacttagcttattttacttaatataaagacctccagttttatccatgttgtcacaaatgacagaattttatttgtactttttagagtacggaatagtactccactgtgtatatgtgccacattttctttattcattcatctattgatagacttgtaggttgcttccaaatcttagctattatgaatagtgctgcaataaatatgggagggcagatatctcctgtatatactgatttcctttcttttgggtatatacctagcagtgtgattgctgggtcatatggttgttctatttttaattttttgaggaacctccaaactattctccacaatgattatactaatttacatttccaccaacagtatatgacagttcccttttctccgcatccttgccagtatttattatggccttttgaatttatccaaaaaagttaatattaactgaggtgagtgctatctcattgcagttttgttttgcatatctctgatgatcaatgatgttgagcaccttttcacatatctatttgccatctgtatgtcttcttttgagaaatgtttattcatatcttttgcccatttccaaattgaattattagattttttttctcatagagttgtttgagctccttatatcttttggttattaaccccctgtcagatggatagttggcaaatattttctctcattctgtgggttttctcttcactttttttattgcttcctctgcagtgcagaatttttttttaacttgatgtgatcccctttgtccatttttgcttggttgcttgtgcttgtggggtattattcaagaaatctttacccagtccaatgacttagagagtttccctaatgttttcttttagtattttcacagttcgaagtcttaaatttatgtctttaatccattttgatttgatttttgtatatggtaagagatgggggtctagtttcattcttccacatattgatatccagttttcccagcaccatttattcaagagactatcctttccataatgtctgttcttggcacctttgtcaaaaatgaactcaatgcatgtgtatgaatttgtttctgggttctctattctgttccatgggtttatgtgtctgtttttatgccagtaccgtgctgtttactgtcactttgtagtataaattgaagtcaggtaatgtgattcctccagttttgttctttttgcttaggatagcttcggctattctgggtctttcatagtttcatataaattttaggattgtgttttctagttctgtgaagaatgtcattggtattttgataaagattgcattgaatctgtagattgctttgggtagtatgcacattttaataatattaatttttctaatccctgaacatggactatttttccattgtattgtgtcctcttcagtttctttcatcaatattttactgttttcattgtagagatctttcacttttttggtaagtgaattccttttatttgtagctattataaatgggattattttcatgatttctttttcagattgctgctggaatatagaaatgccactgattttttatgttgattttgtatctgcaactttgctgagtttattagttctaacagttttcttgtagagtctttaggtttttccaaatataagattatatcatctgcaaacaagtataaattgacttcttccttttcaatttgaatgccctttatttctttctcttctatgattgctccagctaggacttccatttccatgttgaataacagtgatgaaagtgggcatccttgtctttttccagatcttagaggaaaggctttcagtttttcccaattcagcatgatactagctgtgggctgttgtatatggcttttgttgtgttgacgtatgtttcttctatactcagttttttgcatttttttttatcatgaagggatgttgaattgtatcaaatgcttcttcagtattaattgaaatgagcatatgatttttgtccttcattctgttggtatgatgtatcacattgattgatttgcatatgttaaaccattcttgcatccctgggataaatccctcttggtcatggtgcatgatctttttcatgtgttgttgaattaagtttgctaggatttcaatgaggatttttgtatcaatgttcatcagggatattggcctgtagttttctttttttgatgtatctttgtatggttttggtatcagggcaatactagcctcatagaatgagtttggaagtattccttcctccttttttaaaatagttcaggtaggattggtattagttctttttaaaattctaccaatatgtttggtagaattcagcagtgaagccatcagtttccaggcttttctttgccaggagacattttatcatgactttgatcttgttatttgatattgatctgttcaagttttggctttctttatggttcaatcttggtagattgtatgggtgtaagagtttatccatttcttccaggttttccaatttattggcatatagttgctcatagtaacctcaatgatccactaattttctgcagtatttgttataatgtcttcagatttaattttatttatttgggtattctgtctttttttcttaatctggctaaagttttatcaattttctttatcttttcaaaaaactaactttttgttttattgatttttttattattttcttcatttaaatttcatttatttctgatataatcattattatttagtttcttctactaattttggagttttttggctcttccttttctggttctttgagatacattttaggttgtttatttgaaacttatctacttgtctgatataggcatttgtagctatcaactttcttttaagtactgttttcatatattccataggttttggtatgttttattttcatattcatttgttttaagaaatgtttacatttccttcttaatttcttcattgatccactggtcattcaggagcatattgcttgatttccatgtatttgtacagtttccaaaatccctcttgttattgatttctagttttatgccattgtcatcagatatgatacttgatattatttcagtttttctgaatattttaagagtagttttgtgatcaaatacatggtctatccttgagaatggtccatgtgctgaagagaagaatgcatattctgcagtcattagttgaaatgttctgtaaatatctattaggtccatttggcctatggtgtagatgaagtccaaggtttctttgttgattttctgactggatgatctatccaatgctgaaaatggggtgttgaagtctccagctattattgtattgaggtctatctctctccttagctctaataatattttctttatatatctgagtgcttcagtattgggtgcacatgtatttacaactgctatattctctcgctgaattaaccccttgatcattatataatttttttctcttttcattgtttttgtcttgaaatctattttgtctgatgtaagtatagttactccttctcttttttggtttctatttgcatgggatacatttttccatccttttatttttagtctgtctctttataggtaaagtgtattttttgtagtctaaatatcactggatcttgtttttatccattcggcaaccctatgtctttttattggagtgtttagtcccattacattcaatgttattatcgataggtaaggggttactcctgccattagggtttttgttttctggttgttttgtggtcttctcttccttcttcttctttccttccttcctgtgttccttatagtgaaggtaatttttctctggtttatgtttttttaaatttattgggttttttttggtgtatctgttgtttttcaatttgaggttaccatgaggcttgcaaatattatgttataacctattattattattattattattattattattattattattatttgagatggagtctcattctgttgtccaggctggaatgcagtggtacaaccttagctcactgcaacctccacctcgtaggttcaagcaattctgctccttcagcctccttcctagtagctgggattacaggcacacaccacaatgcctggctaatttttgtatttttactagagatggggttttaccatgttggccaggctggtgtccaactcctggtctcaagtgatctgcctgctttggccccccaaagtcctgggattacatgtgtgagccactgaggctggcccattattttatttatttatttttaacttctagtttcaggggtacatatgcaggatgtgcaggtttgttacataagtaaatgcgttgaatgggggttggttgtatagattatttcatcacccaggtattaagcctagtatccaatagttatttttcctacttctctccctcctaccaccttctgccctctgataggccccagtgtgtgttgtttccctctatatgtccgtgtgttctcataatttagctcccacttataagtgagaacatgctgtatttggtcttctgttcatgcattagtttactaagaataatggcccctagctccatccatgtccttgcaaaaacatgatctcattcttttttatggctgcatagtattccgtggtgtatatgtaccacattttctttatccagtctataattgatgggcatttgggttgattccatgtttttgttattgtgaatagtgctgcagtgaacatacgtgtgcatgtatgtttataacaatgacttatattcctttgggtatatatccagtaatgagattattgggttgaatgatagttctgtctcgaggtttttgaggaatcaccacactgtcttccacgatggttgaactaatttacactcccaccaacagtgtaaaagcattcctttttctccactacctctccggcatctgtttttttttttactttttatagtagccattctgactggtgtgagatggtatctcattgtggttttaatttgcatttctctaatgatcaatgatgttgagctttttttcatatgattgttggccacatgtatgtcttcttttaagaggtgtctgttcatgttctttgcccacttttttatttatttatttattattattatactttaagtttcagggtacctttgcccactttttaatgagtttttttcttgtaaatttgtttaagttccttatagacgctggatattagacctcattcagatgcacagtttgcaaaaattttctcccattctctaggttgtctgtttactctgttgatagtttcttttgctgcataggagctctttagtttaattagatcccatttgtcaatttttgcttttgttgcaattgcttttggcatctttattatgaaatctttgcccatgcttatgtcctaaatggtattgcctaggttgtcttccagggtttttatagttttgggttttacatttgagtctttaatccatcttgagttaatttttctttatggtgtaaagatggggtccagtttcaatcttctgcatatgactagccagttatcccagcacaatttattgaatagggagtcctttccccattgcttgtttttgtcaggtttgttgaagatcagatagttgaaggtgggtggtcatatttctgagttctctattctgttccattggtctatgtgtctgttcttataccagtaccatgctgttttggtgactgtagccatgtaatatagtttgaaatcaggtagcgtgatgcctccagctttgttctttttgctttggattgccttggttatttgggctctttttgggtttcatacaaattttaaaatagatttttctagttctgtgaagaatgtcagtggtagattaataggaatagcattgaatgtataaattgctttgggaatatgcccattttaatgatactgattattcctatgcatgagcatggaataatttgccatttctttgtgtcatctctgatctctttgagtagtggtttgtagttctcttggtagatctttcagtttccttgttagctgtatttctaggcatgtcactctttttttttagtagcaattgtgaatgggagttcattcatgatttggctcttggcttgattgttgttggtgtataagaatgccagcaatttttgcacattgattttgtattctgagacctttactgaagttgtttattagcttaagaagctttcgggctgagacgatggggttttctagatataggatcatgtcatctgcaaacagggatagttagacttcctctcttcctatttgaatgccctttatttctttctctcgcctgattgctctgtcaagaacttccaatattatgttgaataggagtggtgagagagggcatctttgttttgtggcagttttcaaggggaatacttccagctttttcccattcagtatgatgttgtctgtgggtttgtcatatatggctcttattattttgaggtatgttccttcaatacacagtttattgggagtttttaacattaaggaatgttaaatgttgttgaaagccttttctgcatctattgaggtaatcttgtggtttttgtcttttgttctgtttatgtgatgaatcacatttattgatttgcctacattgaaccaaccttgcatcctggggatgaagcctcatggtggataagctttttgatgtgttgctggatttggtttgccagtattttgctgaagatttttgcatcagtgttcatcaaggatattacgctgaagttttctttttttgttgttgtgtctgtgccagcttttgttatcaggatgatgctggccccatagaatgagttagggaggagtccctccaattttttgaaatagtttcagtagtaatggtaccaactattttttgtgtatctggtagaattaagctttgaatctgtctggtcctgggctttggttggttggtaggctatttattactgcctctatttcaaaactcgttattggtctgttcagagattctatttcttcctagttctgtcttgagagagtgtatctatctgtccaggaatttattcatttcttctagatttcctagtttatgtgcatagcggtgtttataacattctctgatggttgtttgtagttctgtggggtcagtggtaatatccctcttattatctctgattgtgtttatttgaatcttctcccttttcttctttattagtatagctagtggtctactataatattattaaaaaaaaacctgctcctggattcatcaatcttttgaatggttttttgtctctctatctccttcagttcagctttgattttggttatttcttgtcttctgctagctttgggatttgtttgatcttggttctcaagttctttcagttgtgatgttaggttgttaacttgagatctttctagctttttgattgggcattttagtgctataaatttccctcttaatactgctttaactgtgtcccagagattgtggtacgttgtgtctttgtgctcattagtttcaaagaactccctgatttctgccttaatttcattatttaccccaaaatcattcaggaacaggttattcaatttttatgtaattgtatggttttgagtggatttcttagtcttgagttcggatttgattgtgctgtggtccaagaagctgtttttatgatttcagtgctttctcatttgctgacgagtattttgcttgagattatgtgattaattttagagtaagtgccatgtggtggtgagaagaatgtatattctattgttttgcatggagagttctgtagatatctatcaggtccatttgatccagtgctgagttcaggtcctgaatatctttgttaattttctgtcttgataatttgttaatattgtctgtggggtgttaaagtctcccactattattgtgtgggggtctaaatctctttgaaggtctctaaaaacttgctatatgaatcagggtgctcctatgttgggtgcatacatatttaggatagttagctcttcttgctgaattaaaacttttaccattatgtaatggctttctttgccttttttgatctttgttggtttaaagtctgttttgttggaaactaggattgcaacccctgcttttttttttttttccttttgcttggtaaattttcctccatccctttattttgagcctatatgtgtcaagagaccttgcatgtgagatgtgtcttttgaagactacgtaccaaaacccattattttcaactgacaacaactcaacactgattacataaagaaacagacaaactaacaaacaagcaaagaaaaaattaataaaaacactacactttaactttgtcccccagctttttaactttttgtttctgtttatatattattttaatgactctgtcttgaaaagttgttgtagttaatattttttaatttcctttcatagaaagaaaataaatagaaaaataaaagtatttcattatactttctttctaagggagtgttatgtcttcttttccccacagaaatgtattttatttatttaatttttttatttctataggtttttgggggcaggtggtatttggttacatgagtaagttctttagtggtgatttgtgagatttggtgcacccatcacctgagcagtatacactgcactcagtttgtagtcttttatcgctcaaccccctcccaccctttcccctgcgtccccacagtccatagcatcattcttatgcctttgtatcttagcttagctaccacctgtaagtgagaacatataatatttggttttccattcctgagttacttcacttagaataataatctccagttccatccaggttgctgtgaatgccattaattcattcctttttatggctaagtagtattccatggtatataaataccacaatttctttatccactcattgactgatagacatttgggctgtttccatatttttgcaattgcaaattgtgctgctataaacatgcgaccagtttatcttttaccctttctactcaaaatattggtagtttacacaccacaattagagcattataatattctgtgtttttctgtgtatttgctattaccagtgagttttgaaccttcagatgatttcttattgctcattaatgttgtgttgtttcagattgaagaacttcctttacagttctggtgttaatgaaatccctcagcttttgtttgtctaggaaagtctttatttctctttcataattaagaatatttttgctggatatgccattctaggatacaagttttttccttcagcactttaaatatgttacaccactctcccccggtctttaaggtttctactgagaattctgcgtcagatgtattagagctgtattgtacgtaatttgtttttcttttctcttattccttttaggatattttctttagacctttgggggtttgattattaactgtcttgaagtcatcttatttgggttatatctgtttggtgttctataaccttcttgtacttgaatgttgatatctttttctaagtttgggaagttctctcttattatccctttgaataaactttccacccttatctctttttctccttatactttatggccaataactcttagatttgtccttttgaggctattttcctgatcttgtaggcatgcttcatttttaaacattcttttttctcttatctcttctgatggtctgttttcaaatagcctatcttcaagctaattctttcttctgcttgatcaattctgctgttaggataatttgataccttatatagtgtgtcatttgcatttttcaactccagaatttctgcttgatttcttacaattatttcaatctctttgttaaatttatttgataggcttctgaattccttctctgtgttatcttgaatttcctcaagtttcctcaaaatagctattttgaatcctctatctgaaaggtcacataactcttttgttccaggattggtctctggtgctttatttagtttgtttgttgagggcatgttttcatgaatggtcctgatgcttgtagatattcaccagtatatctggatattgaagatttatatatttactgtagtctttgcagcctgggcttgtttgtaccatccttcttgggaaggctttccaggtattcaaagggatttgggtgtcgtggtctgtttttggtcactgtgactgtatctgcattagggggcatcccaagctcagtgatgctgggctctttcagacttgtagaggtacagtggtggtcttggataagatctggaagaattccctggattaccaggtggaaacccttctcctcttcctttactttctcccaaaccaatggagtctgtctgtaatgagctgcctggagttaaaggtggggtgacacgagcaccactgtggctgccaccactggactgcactgggtcagatgtgaagccagcatagcactgagtctcacccaaggcctaggataaccgtgcttggctactacctatgttcacacaaggctctagtactctacaatcaggagatggcaaagtcagccaggctatgtccttcccttcaggttagtgagttcctcccagtcccaggcaggtccagaaatgccatctgggagccagagcttggagtcggaaaccttaggactctacctcatgctctattctactgtgtttgagctagtacccaagccataagacaaagtttttcccactcttccctcccctttccacaagcagagtagcctctcccttggccaccaccaccctaggaccacagcaagtactgcctgcctaccaccaacgttcactcagggcccaaatattcactagtcagcttgtggtgaatgctcccaggcataggactctctcttcagggaagtggactcctctcttacccaaagccagtccagaaatgctgtgcaagagccaaagtctttaatcggggaccccaagagcccaattgctgctctatctcactgtggctgagctggtacctaagttgcaaaatcaagtcccctctacttgtccctgtcctttgctcaagcagaatatctcccaatagccaccatagctgggaatgcactgcatcacatctaaagccaccatgtctctgtgtttcacccaaggcccatggtgagtacagcctggctacaactgctgattatttggggaccaagagatttttattcagaaggtaatggatcctgcttcccttcaaggcagtaggcttccttttggcccagggtttgtctagaaatgtcgtctcggagctacggcctggaatggggacctcaggactctgcctggtgccctattctattgtggctgagatggtatccaagttgcaagacaaagttatatttatgctttcctctcctctcctcaagtgggagggaggagtgtctcctggagccgtgtgctgcactgcttagggtatggggcacgcattccttggtggtgcatgcacctgaggggtggtgcaggcattcccttggtgactttggctggtgtctcactaggttgtataccctcatagcccactggctatgagtccagcagagcaccagtacttgcccaggaattgcagtatttgtggcttagagtgcctttcaaatttatttaggaccccagagcccttcagcctgcagtggcaaagattgccagaactcaggtttctactactgatgtgagtgattccctctggctaggactggtttaaattcttcctccatgggcgcaggatgagttatgcccagtattgctttctgctgtgatggggcagcactgagttccagtgcaaggtcccataatcactgtctcttccccaagcacacagattctgtatctgcaccacacagccactaccaagcggatgagggaggagtagtatcaacaattcaagactgtctttcctaccctcttcagtgtctctctcagtgataacgatgttaaaaccaagtactgtggtcattcacctgatgtttggttcttatgaaagtgctttttgtgtgtgtgtggagagttgtttaatttggtgttcttatgggtaggataattagaggatgattagtggaggcttctatttggccatcttgctctatttccctcaaaagaagtttgtttcacataaggaaacttaacgggtgaaagacctcttttggtggtggtaatgagatgccactcagggcaactgtgctagctgcacctcaatttattcttcatggattaagttccaaagaattacattgttctatagcatgcaatagacatactatttatatttaacagcatttatttatttattcttttattaaacactttttttagatatcaactttgtatcagatgatatccacagctagcccatccaaggctatttaatttttgtctatcataacaatgacatgaaacattcccctaacaacacctgcaactctgtcacttcaggaaattgaatttccaatgtgatgttttggggatatagcaaccacaccaccaccttatgaaagtcatgggggtttcttttttattttcactctgcaaatggtatgcaagcataactgggtcttctctcagctccaagtaattcagcacaagaatatcacttccttcttatcaatgtacctcactcctacaaaatccctcttggactggcttacaagtaaaataaaatgaaaaatggagatcgtggttagttgttgaatgtgtgtgtggtagtgggtagtagggggtaaggtaataagagataaagttggggccacttggagaaagaagaggaagagtgagaaggagatacaactagactaagtggctgctaagaaaggtcaggtgttcatatgataggactgacatcagtgcaatgtatgtactttccctggggaagcagattgacttcccaaattaccatgaagctcagagtcaaacaacctcaattgaaacctgagttccatcctttgttagctgtgagacctgggaaagttacttaacctccttaaagttcagtttcttcaactgtaaaatgggggtcatcatcatcatcatcatgtgtgaggaatttttgtgagaaataaaattatgcatgtaaataacagtctaatgcttggcacctagatgcctaaacatcctcattaaatgatagctagtatttatacttttattatgaataagttgctaattgtctgttttgaaagttaacaatagaaattggggttagaaaggctcttctgacaactaaattgaggattaaaagtgaaaaaaaaaaaaagctaaaaatggcagaaccttcttgaggacactgaagatttcaggccttagttgatatctacagacattaagaagtaaaaggaggctgggcgcggtggctcacgcctgtaatcccagcactttgggaggccgaggcgggtggatcatgaggtcaggagttcaagaccagcctggccaagatggtgaaaccccatctctactaaaaatacaaaaattagctcggcgtggtggtgggtgcctgtagtcccagctactcaggaggctgaggcagagaattgtttgaagctgggaggtggcggttgcagtgagacgagactgcgccactgcactccagcctgggtgacacagcgagactccacctcaacacacacacacacacaaaaaggagtttctcaaaataggtcaatttatcatcatcttaggagataagagggcatagctgaagatgactcttacctcagttcggtgcaccagctgctgagttgcatcatcattcatacgaaaaatttccagaaatgggtcagatttactgaagaaatcctaaaatagataaacgtcaatgaattgtttttcctcctgcatttgatctagtcctgatcaatcaggaatatttaatcaacaggaaaaccctcttgatttcctattttttatatgtggaagggaggccatgcttgtcctctcttcctgcccagttctactcaaactctcttctctttacctgtgatcatgagccccaccctttcttcctttgatcctcatccctgagatccacccttggctagaatggactgcatctgaaagctaagttctttgtaaagtcagtacttggttagttgaaattcaaagtattcttcaaagatcagttcaaattccagttctttgaaaatcactgtatctgttgtcttaaacaggttcattatagttattttaatgcctatgtaatgactacaatgtctggatcacctataggtctatttttattatctctttcttagttccacctcttggtatgcttgttaattttttattaaatagtagacaatgtgtaatgaagattatgaaggtttttacatgagtctttagcttctagcaagtggttataaggggagaagtctcctgaatccaattaggattaagctatttagaggatgaatttcttcaaatgtctttaaagcccctatccatttctgatttcctttactccttgggtatagtcctaaaaggaccctaactgaaaacctgagtgttcacgaggggtgttcttccttgacaagtcttcaatgccaatttttatttgtgagaacctcaaatgctgtgtttattttcataatttcttagctctaggtttttgttcagtttctctctatgctgcttttgctaattagcaaacgccttgagatgataagccactcatactgttggactacttgtcttctctgatgcacctatgagtctttatcctttgctctctcaatagccctgaacttcagtttttctccccagccccatgagaccaccaaaagctctgctcagtttctgtttcttagtagctatttttttaaactaggcttcccagactttctatccacactattttacgaatcagccttgaggaattcccttgagtggaaaatctgcacagaatgtcttaagcacctccatgggtttctcttctgtccagtttcttggcccctcaaatctacactgcctcaggactctcaaatacatgtctcttgtgtcttttctagtgtttatatttgtttttagtgagagagtgatgtaaaataactaagtgcttcattgttgggaatggaacctatctccatcccttttaaaaacttgatttttacccccagtagattataaattctcaaagaggagaaactttattttcctttatatttctgctatttcctcagcattttccatagtgtctagattttaatagtacatagtgtttattgaatgaatgaataaatacataaataagtgaatggatacctggtataggataggaggctatctgagcaaaaaccttattcatcaccatcacatttttattacgaatttcaccaagtaatttttttccagaaatctagactttagcaaagtagaattaagcccatatttgccttaaaagtcatttattattcctaaatgttaagcaagccagagtcaaactcgttattttcctttgtttggtctctacttctaaattttgccttactatcaatgtctttaccagccatcctagtcttcagctcagcaaaatatttgtaggacatatactgatcacagagtttttgtgcttgatgttaagatataaggacagatagaacctgatctcagtcttccaaagtaccatctaggttgctggtaagaaaagtatacaaataaatataacctagggctaggtataaatgagtgaatgagtgaatgaatgaatgaaggtataaggagtattgagggaagagaggggagctgatgaatttttcacagacatagagggggataccccaagtaatttaataagactatagcctagggaagcataggggaggaattggagacaatgctggcaaagttggccccatgatgtgaagggccttaaatgctcatctgaagtctttgcactggcctggagaggcagggggaatcattgaaggattttgagcagaaaagtaatatagttggctctgcagtgaagaatgccagtctagaaactttgtagtatatgttagaaggaggagatgagaggtgggaataactatcttccgctttgctttccttcccatgcaaccaggaaccaaacaagatgctccacaacacccagagtctggaacatccgctactactctatttctgaaggtgccttcagaagattaccacagccttcatcttgtcaagaccccaaaatggtggctttcatcataatcttgcccttcaaacatcgtctctcccccaaaatggcccatttctctctcagatgcacttctagctgattcccacctctatgcatttactcatttgccccttaggccagtttctgtttctacatgcatcttaaaaaattaaaacctccttctcttctccctttccctatggatgtgggctacagtagcttgttcctacgtgcccttgggctcctcctgtaacttcacgctttgcctctttaaatagattgttggtccctcaggggatgtttttatgattcatacttaaaaactgctaaccacaatgtaagaactttctcattttttccctctttactgttaatttaaaacttttgttaccatcacttttatttaaaaatgaaaaatatagaaaacagatgacaaaaataaaaagaaggaaaaaagaacccataactgaattcaaaattccataaccatcaatagaattttgataaatctttttctagactctacatatacttttctgtctttctttttaaaaattttgtaatcatgatctatgtacaatttagtaccctatttcttttgcttgttgtatacatatttacatgttgtatattacaatgctttttctattttatttcacattctttttaaataccatgaatgaattaggcaagaagttattgtcaggagggcatactaaaatgtcaatgaaagaaaggtcaagaatggcctctgtcttcaggtagctgaaaatctatacgcagcatactggctttagcactgctttcaaatctcaactctaccacatataatctgaataactgtggacaaaatatttaatttctccaaggcttagtttgccattcataatggaaggagtatcaacctttgcctcatagtgacaaagaagaattagaggacctggtgaatgggaagtgttgagtccattgcctggtacacggtgaagactgaaaaaatgttagctgcaaaaatcctcaacaaaatactagcaacccaaatccagtggcacaacaaaatttaatctattacaatcaagtacactttattcctgggaagcaaggttggttcaacgtacacatatcaaaaaccatatgatcatctcaatagacgtaggaaaaaaggttttgataagatccaacatcccttcatgataaaaaccctcaacaaactaggcagtgaaggaacatacgtgaaaataataagccatcttatgcttatgccatctatgacaaacccacagccaacatcatactgaatgggcaaaagctggaagcattctgcttaagagcaggaataagacaagcatgtcaactctcaccattcctgttcaatatagtactaaaagtcctcgccagagcactcaagcaagagaaagaaataaaaggcatccaaataggaaaagaagtcaaattgtctctctttgccgttgatataattctatacctagaaaaccctaaagactatggtgaaagactcctagaactgatcttcagcaaagtttccgaatacaaagtcaatgtgcaaaaatcagtagcatttctatacaaagtgagagctccatcaagaacgaccccatttacaacagctagaaaaaatgaaatgcctaggaatacatctaaccaaagaggtaaaagatctctacaaggaaaactacaaaacactggtgaaagaaatcatagatgacacaaacaaatggaaaagcattccatgctcatggatcggaagaatcaatattgctaaaatggccatactgccaaaagcaatctacagattcaatgctacttacatcaaactataaacatagttttcacagaattagaaaaagctattgtaaaattcatatggaacaaaaaagagcctgaattgccaaagtaatcctaagcaaaaagaacaaagccagaggcatcacattacccaacttcaaactatactataaggctacaataaccaaagaagcatggtactgggacaaaaacagacacataagaccaatggaacaggatagagaatccagaaataaagccacatacctacagccatctcttctttgacaaagttgacaaaaataagaaatgaagaaatgtctccctattcaataaacaatgctgggataactggctagcaatatgcagaagactgaaacttgacccttacatttcaccatatacaaaaattaattcaagattgaataaaactttaaatgtaagacctcaaattatagaaatcctagaagagaacatatgaaatatcattctggatgttggccttggcaaagaatttatgtcgaagtcctcaaaagcaacaaaaacaaattgtaacaaagaatattgacaagtgagacctaattaaactaaagagcttctgcacagttaaaaaaaaaactattaacagactaaacaagtggctgatagagtgggagaaaatattatcaaactatttgtctggcaaagatctaatactcagaatttataaggaacttaaacaattcaataagcaaaaataaataaataaacccgttaaaaattgggcaaaggacatgagcagacacttctcaaaagacgacccgcaagtggtcaacatacatatgaaaaaatgcccaatgtcactgattgtgagagaaatgcaaatcaaaaccacaatgagataccatctcgcaccagtcagaatacctattactaaaacgtcaaaaaataacagatgttggtgaggctgtggggaaaaggaaacacttatatactgtttgtgggaatgtaaattagttcagccactgtggaaagcagtttggagatttcttaaagagcttaaaacagaactaccgttcaacccagccatcctattactggtatatacccaaaggaaaataaatcattttgccaaaaagacacatgcacttgtatgttcatcaaagcagtattcacaatagcaagggcatataatcagtctaggtgccaatcaacattgaataggataaagaaaatttggcacttatataccatagaatactacacagccataaaaaaataatgttttctgtaacaccctggttgcagctgaaggccatgatcctaagggacttagcacggcaatggaaaatcaaataccacatgttctcacttctgagagctaaacattgggtacacatggacataaagatgggaacagtggacgatggtgactaccagagcagtgagagagggaggggagcaagggctgaaaaactacctattgggtcctatgcttactacatgggtaatgagatcaattgtactccaaacctcagtgtcatgcaatatactcatgtaacaaacctgcacatgtaatctctgcatctaaaataaaagttgaaatattaaaaaaaaagtgggctactatgatgattatcaatagaagaaaaaattcatgaaggcattttgtaaaaaactgtacaaatatcaggggtgattactattaagaaggcatctgattcatggaaatgaaataattcataagcacctcaaaatctcaagtgtacgctcagaaattcatagcttcaaaacaacaactctgggtctaattgtgtggtcactttaatttggaattttcagctttttaaaacttgattattagcactaagatggccattgggacagttcagttcaaaaaagatgaatgaatagggcattttactgaagtgttgctgtggtaaaattctttaataacacagagaccatattattctgcttttttagttcaatataaaagaaatttagctaagtaagagggtgataagcaattaggaagcagttcatacccatgacggtgatcttgaaaatggaatattggacctagaagaaattatctgaaagatgtaggcatatccagtctgtacagcttattaattttgtgactctgggaaatgtctgatctgagtatgctttatctataaaatggaaataaagatactaacttctgggaatatgcttatgagctttggggataatgtaggttagacacctgatacttggcacataatagatgctcaataattataattttctatcattaatgcagaccagattacagtttcaagcaggcatacttaaacatagtaaaatcacatcacagcaggtagagattttacattgttttagagtaggggtcagcaaactatggcacatgagccaaatctggcttactgtttgtttttgtgaataaagttttattggaacactgccacattcattcatttttgtattgtctatggctgttttcatgcttcaaaggcagagctgagcagtggggacagagatcaggtgtcctgcaaaacctaaaatatttatcaactagccctttattaaaaagtttgccaacctctactttagagacagatttgtttacttatattgcaccccatcaaactagcatcatgggaacactgaaaatgcagtctataatgattactattacatatgtggagaccaccagtgtcggaattagttccaatgcaccaatatgaatactttctcaagaatgggaaaagaaagaatcctttgtcagcttgaatgttccaaagtgattattacatttctgtctctacttacttgttagattaattgccgactagttgctaatgtaacaaatgtgctttacaagttagaaagtccctttctctactaagtgaattgcattaacattagataaataagttatttatcacaaacctaagctattttatgtactcactctcattgaagagtgtggagatgattgctagtctgttgaaagacaaattaaaaatgactgtttctgtcaaaaagaatggtgcatttctctgtcactgtggtttgcaaaagtacttagtgctttcccatataccctataacaggggttctcaaacttttggtcttaagacccctttacattcttaaaagttattggggataccaaagagcttttgttttgttgtatgtattaatatttaccatattataaaactgttaaattgttaaaatattggttacattgtttaaaaataataaaataaacctactacatcataacaaaaatagtattttaatggaaaaattattataattatattttccaaacttaaaaaatggtgagaatggtattagtttacatttttgcaaaccaatttaatgattagcttaatagaatgcagcagaatccttatatttgtgctgtattcaatctgttgtgatattaggcatcatgcagcctctggaaaactccactttacatgtgtgagagaatgagagtgaataaagaaaattatgtcttggcattattatgaaaatagtattgacttcatgggttcccctgcaaaggtattgggaccatgcatcacacttggaggactgctgcctgacctcccctcttacctcccctcttacctcccctcttcctggcttcctacttccctgaaatacatgaaaacatttccaagtcttccatattctgagaccaaaccaccttctattcattaactctctgctccaaaagacttagattttgtcaggcaatctgtttgagtccctctcttgcactgatttttttgtgagtgtgtgcctgtgtggctttcagtaagtcatgccacatctctaaactttaaaattttcatctataaaataaggcagttggattagacagtggctttctacctaaagtatgtagactcctgggggctaccagagttactgccaagggactggagatccaggcaggcatcctacaaccaccgtctgaattggatatagcatatttttcctacatattcatacttcaatttttaagtgtatgtagaaactagtgactttcatgatattcattaacataataaaaaattaggagcattgtttattttatagtgacttttagtcatacaataactagatacagtaagttttaactgcaaacatgtagatagttataaaattgtttaatgctaaaagctagaaaagggtcctccttgagagcatctgggaactatttttccagctgtgacatgaaataattatattattttattctatttctatcacaaaaatattgtggcagtttgcattttgtaaacatgaccaccacaagttcatagtccacatgctttttctccagtatgattttgccactgccctaacacgatgtggagtcctagaatctgggctggccttatgacttacttgcaactaaaagaatgcagcagcagtgatgatgcatgacttccaaagccaggaaggggtgagaaaaggccaccgagcatctcccttgttctcttgaaatgctttctctgggagaagccagatactctaaaggaagtgtgactaccccaggaccaccaagtaggcactctggtagactgttccagctaagcccagccattcagccatctcatgtgcgaggcatgtgcgtagagctagtgtagaacctccagacaagctcatccacaagctgagtaccactgagtgatttgcatcaacatcatagacagcagaactgcccaactgaaccctgattgaatttctgaccctcacaatcattagctataacggaatagttcttcatttaggttgctagatttgatggtttaccacacagaatagattgtttaccatgcagcaatagaaaaccagagcagtagtgttgtgtctttgggtaaatcatcataccttgctgagccctcatttcctgaagaggttgtgtgaaatgatctttatgttatcattttgctcctccattctacaactttgccctctttccatctgagaccatttaacttccagtccaaactggagcaaaggcctctgatttgttctctgaattactaaggatctggacaagacatagtcacattatgaaggaactggggtttccagcactggggcattcaggctcagcaatgaccagggtcctggacaatcagtacagccaatggtgggaatagccatttagaaccactgtaagtgctgcagggggctctttcaattctatgagcaagtgttcatttgactaaagggaaactgctcaaacacttcaaagccaactggtccaacaaacctccaagcccgcccccttttactataacataaatcagttagatgacaaactagaggtacttaagagcatactaagtgtagagaaaccattataagccattaagcaagtagcttaaaactgctatccactgacccagtggcttataatagcaccagggaagatactataaagaagttttgtgagtttttctgaaatttggggagatgatgaaggagaaggagcataacagttgtgaaaaggtgaagttaaaagcttgctcccaactgacatctatgcacactgcagttcccagcacctagttcatgctcatgttaagaatggagcagtctgtgatggtttcatataatctattcaagacacttttaaaatccaaatataattagtttataaggataaagtatttcctgatgtccccaggtagaataagttggccttaccaggacacactattatatatcacttatcacattctattgtggatatattattactatatcatttgttttttagatgtatgttttacttcaatgatgaattccaggttgcagatgtgagagtggaatgtccatttttgatatgccttttttccagcacctcatgcataacaagcacccaacaaaggtttggaaaatgaatgatgaatgaatgaacaaattaacaaataaaagagtgaaccagtgaatgcataagtgggctgactattaatacgtgataaataggagttgtacaaatgaataaatgtgataccacataaaaagctcttaaacctgtacttggcaaacataggtgctcaataaatgtcatttttcttccctttcatatcttctcctctcccttagaatgtccctagaaatggggttaaatcatatttacctgtgcacatctcaccggtggcatttggaaacagtcttggtgtcatagaattgtcttgttttaattacagtcccttccctttctcattaattgatctttaatgtgggggaaagtttactttgtagacctctctgaatttttggatctgtttgataatgtgggtggaaagggaaaaatagttgcagggggaaatctgattaaactgtgtgctagctttgttacttccttcaataaggttaatgccaaacgctttaccttgtcatccaatttccgtgcattgaatgcaagctcaacatagtcgtcattgccagataattcttcagcaatcacctaaaggaaaaagcacacatcagctgcaatagagggtgaactccttagctccagaacccatgagcaaatttagttcctgtttggttcaaaactcaacaaagacaaatgttgggcaaagagtttttccacaaccctagtgactacagcacagcaattctaggtattcaagggaactccctggaatagacaatggtaaataactagacaccatttatactgagcaagagaacataagagatgggacccaagctgaaggaaaaaatagaagagcagtttggaagagcttctttctttaaaggtcacatggcattggatagtatttctataattaactacaatgtctccctttggtaaattacagagaaggaaaaacagcaatatttctttttgagtgagaccaacaagaaatgttggaataaactagtttttatgtcaaatttttctaattcctatttttcaaaagactgtccctgggttttctgagatgaagatatgggtatacgtaaggatttaagccctaacacccaagtacagaccattcctgacaaagattttggtataagtgaagaaattactgtccaaaagactttctcataataggtcattttccaatacttaatagttagtgactctcaacaaagccttggagcagaaattggtggagaaagtcaggagaaaaataatgacaacaaaagcaacaaaaatctagaagccagtcaagttgcagataagttaaaacctttataaataatgttaggatttaccatgtattctgtggccacagcacatggatacgcttatcaaattgcttatatcaagatactgataattcagttttacctcttttctatctgagctcaacaattccattatgagttgggtccatatactttcaatagtcactggtaatattccaaatattttggaaaatttaaattatttacacttaatcttaaagctaagatggctaccttaagacagatagacccaaaaatgtgtgaacaactgagagtagagattgtgagtccaggtatataggaaaaactctagaactggttgataacccaagaactatcatatttgtatttttcatttggttctcttttgtcccttaccaccttaatgcctcttatacttcatttgattactgacccttaagtattttgtgatcacagacacctttggaaaactgatgaaagttatgattttcaccatctgcagagacctagaaaatttcatgcaccttttcaagtgttttctagaagctattaaagccaatgttttgatctaaagactcaaagttgaggagcatttaaatacttaaaattaaatggggccaggggcagtggctcatgcctgtaatcccagcactttgggaggtgaggcgggcggatcacgaggtcaggagatcgagaccatcctggctaacatggcgaaaccccatctgtactaaaaaaatacaaaaaaaattagacaggtgtggtggtgggcgcctgtagtcccagctactcgggaggctgaggcaggagaatagcgtgaacccgggaggtggaacttgtagtgagatgagatcgtgccactgtgctccagcctgggagaggggcaaggctctgtctcaaaaaaaaaaaaaaaaaaaagaaagaaaagaaaaagatcaaacttttcttggatatgtggagaaagaaaatctcaggatatctcagagaaaatatggcaagatgagattttgttcttttgagaaagaaccatagcaaattcatacctggatctactggttttgtgggctttgggagtgaacccgtgggtccatagcttttcagagcaccatcagtgtcttcaaagaacactttgattcatgactgaagatggcagtcaagaaaaagctttaacatgacagtgtcatttaaaatattcaagcaacaaactcaggtaagttcttgtgagaatggccacaactttcactgacagctcttttgaatttttcctgtgcttaaaaaaaaaaaaaaaaatcagggcagggtgcagtggctcacacctgtaatcccagcactttgggaagccgaggggggcggatcacaaggtaaggagttggagaccaacctggccaacatagtgaaactccatctctactaaaaatacaaaaattagctgggtgtggtggtgggcacctgtaatcccagctacttgggaggctgaggcaggagaatcatttgaacccaggaggtggaggttgtagtgtgccgatatcgtgccattgcactccagtctgggtgacaggctgagacactgtctcaaaaaaaaaaaaaaaaaaaaaaaattggtttctctctagttaaaaaggaatgttcaaaataactcaagaggttcgttttctggcaatttgcctctctagcaattcagaatttccttgtagttttttctaccttgtttcttttgcttgtctttttgtttgtttcttttttcactccatacatccaaatggttggacaacatcctctacctttttcaaggtctcttaatagaagatgtcgaactttcaaataccaggcattccattcaaaaatgtaagctcttatttagaaatacttctagcattacccaatagaacattctgcaattatagaaatgttttataatctacactgtcccatatggtagctgctaaccacttgtaactattgagcactggatatgtggccagtgtgattaaggaactgaatatttactttaattttaaatagttttattaaaatttaaataatcacatgtggctagtggctactgaatcacacagtaaacctccaaactattatatcaaagaggagtgttaaatgctgagctctttgtttgtcaggaaacaaaccaaaccttgaagtaaatgctatcaaagcaaaattttaattctcaaaataaatgagagacgaggacacgtagctttgaagctttgattgtgtgaaaatgctagacaattccgtaatctcactgtgctcaacaactacatctttctcctccactaaaatctatcttgcaattgcagaagtgcttactagaattaaataaccttactttcaaatgcttttccttttttatttttcctagagttagaaggatcaaaattgtattgtcagaaaagagaaagaaagaaaaataagggagtgatttcaatagttcagtagttgtggcaccaactcccaatatcagaaagtctgcttcccaagtgtctggtttgggctggccagtccgcccaggctctccactcaggcagacagctgcttagggagtgcctgcttaccgtgatggaagatttccctgctgtgttcccatgcttcagcaaggatttggacagctttctctgggaaacaatctgcaaaaaaggaaacaaaaggtaacaaaaggtagagatactagtcatttaactgtagatctattttttaaacctttttttttttttttttttttttacaaaactctgcattcacgtttgtgtcaatttatatttcagggtttgtcaatgagcctctcctaatataggttattcccttttctctttcttcttatggtgtgtgatatgagagagttagtgagtgaagaattacagataatgcagtcaattgggaggtggcttaattgttgatgaaggatgtatattaaaattagacagacaactttaaacatgtatgttaagacaaagtagataaagtttcaaaatgatctcaaatatatcattaagcctccaggcaaagtgggggatggggtgcagggagggaaaggaactaaagggctaaatataacttctagagttctatttttaatatattcattaggaagtcataaagtaagtcatcagaaaattgatgctcagacaagtcaatagaagtaattgcggttctcttcatgattcaatgccaatgcacctgcgcaatgacaactaaaatcatcatcatactgaaagctattcctagcagaacttgtcccattctctttttcctctttcttccttttttgaaagagaagtttgacaaggcattgaagccatgattggttggcaacccatgattctcaaaggagaaaagggctaaaaggtctagaactagaaataccatttgacccagccatcccattactgggtacatacccaaaggattataaatcatgctgctataaagacacatgcacatgtatgtttattgtggcactattcacaatagcaaagacttggaaccaacccaaatgtccatcaatgatagactggattaagaaaatgtggcacatatacaccatggaatactatgcagccataaaaaaggatgagttcatgtcctttgtagggacatggatgaagctggaaaccatgattctcagcaaactatcgcaaggacaaaaaaccaaacactgcatgttctcactcataggtgggaattgaacaatgagaacacttggacacaggaaggggaacatcacacactggggcctgttgtggggtggggggagggaggagggatagcattaggagatatacctaatgtaaatgatgagttaatgggtgcagcacatcaacatggcacatgtatacatatgtaaccaacctgcatgttgtgcacatgtaccctagaacttaaagtacaattaagaaaaaaaaaagaaccaagttgaagctacactcatgcttagagggaacaacatcatccattgtggctggaagcttctatttaacatggtccacaatgatcctatcttcataatattcatgctattgtgtaatattctcccctcaagtgtgggatggacccagcgacttgcttctaaaaaatagaataatacaaaagtgatgggatatcacttctgagaataggttacaaaatgactgtgacttatctcttatcactatcttatatcttatatcttaccactatctctcattctttctctctctcagagcctttgctctggaggaagctagctgacagattgtgagtagtcctatagacagaccatgtggcaagaaactgaagtctctggctaacagccaggagcgtaagcctggaagaagattctcctctaagttgagccttgagataactgcaccttgattgcagcttcatgagaaacccttgcatttggcactagtagagacttggtgttttcattgcagtaacacagagacaaaaatatatgaagaggactcagaaaagctgtaccctgattcctgacatacagcaactgagataacaaatgtttggttttttaagcttttgaagtactttttttaagttttgaagtaattttttattagcagagagcaatgatactgtacacatattattcacagaaagacaggaaaggagatcaccatgaaaggccaggaggtaaactcattctttgaaattttcatttatttttgtctgtgttacagcaatgaaaataccaagtctctactagtgccaaatgcaagaagtccagagaacttccctaggacaagcagatttaaagatcttgatgttcagtctgctataatctgaagagaaaatatttctgtaaaaaaatcacctggtaatgatgaccatgatcatgatcatgtttgtgatgatgatgacaacaatgatagcaatgtagcaatggaaactctcacttaaggagtacatattatgttacagatgctttattcattctacaaatatttatttggcccccactgtatgctagacttggtggtaggcactaagaatagagtggtaagtaaaatctgatgcaatgtctaacctcacggagcttacagtttctctgcacgttttttccagcaagggaagtggggaagacacatgagtaagtgacaaaacaagggtcatctgtaagcagtagccaggacaacatctgactaaagaaaggcaatgtatcccatttcccaaacaaatctggtctcagaaatactaatgtccattgtcattgtgattcatccgcattggtcacctactcccctgatgtcaggagaccccaacaaccctctcggccctataatagcccactcattgcattagcaggtgtgggtagaccattttacagacagtgtcttacaagattcacattatctttattcaaggaagagtaaaggagactaatcccaagagaacctggatggccatagttctctctcctcactcttaacttatctagaaataccaatgttccatttgcagggaatgaagaaaatgctactgtatgccagcttttgccttttgcaaatgctaggaagataagcaatttcccaggaaatatcccttcttaggaaatgggcatttgggtatacaagtggtgttttacagcctcgaggtttccatctcagctccaaggaatgagtaataatcagggttttgaatttttcattgtaataatgatggacaagaaatgagttgccattgatgttgctattctcaggacagttgggcaaaaatagcaaagaagcccaactggagcagtgatctgtagagaaaagcctatttgttgcaaatcccacttatcatgtacactttgctgcagctgtagcaactgcacccagctcaaaaatgctttaggtcttgacagaagatgagaaagtcagagtcacaaggactctcaccctggcttcagctgacatttgaggccaacaaatagcaaattgtgcctgacatcaaggttaaaagggatccatttgtcagaagttccttaatttgattctttataccctatgatggggtcacaggtgcaaaccttagtattcaacaaaagggtgaagtgtagagggaggatttagaagttgaaatactctttttagcaaggttggaccagagaggccttagtaccattagccctcttatctgcatccacccacggatctggggagaagtggttcttctctagcaaagtggacaatggcttctaacagcatgggtcttcaattttagaaaaatgcactgtttcattaagtgggaacaaagcaaggagaataaactgctcagtatttcaacaagtttatattcagctgaactttattccgaagtctttcgaaacagtcatttttggaactagagagtcatttttcatgaggctgtttttattgaaaatattttcagaattttttttatattctttaaaacagttacaataacagatatttattgaatactttctaggtaccagttactgttcataggctacaatggtgagtagaaacagattaaaaacatcttacaatgtagtgaaatctcagctagctttaatttgatagccccaaaacatgcattatagaacttttattccttaaaaggtaaatacatattatttgaaaaagtgttggtgtaaatgagtttggaatttataggattatacaaagtttaacatttcaactacaggacttcaacagagctttagttgtgaatcccatgaaacaagcattccttacacttgtttggcctgagatttctttggtacaggagtctctctagtgttttgcaaactcctagtacaattactaggaccaaccactacggagaactaaggtttcctggtctctcactgtagcaggcaaggaaaaactgcccagaacttcccaggcctccctcttgcagagctggtagggcttccaacagccaattcaggcatctctttgcctgaaagtttcctctggtatccatggctactatccacaagcacagcaagatggaagtggggaggtagtcatcccttggaagcagatctcaaccagtgactgatggtctttggtacataaatatctcggctcttttgtctcagtagtgagggctgacactgggtgtttgttcaatatgggtgcctgacttgtcccagtgaaatgaagctccagtttctcccagtggtgatttgttaactaatgcaccctttattttattggctgttttctctttgctatctcacttctcttttttctctcctgctgtttccttcacctcacaaataatctacttaccctccaatgcttgactgtgtctggaagaacacaaccaagacacttattctgtgacagatgatatgtggaacacttaatgctaattagatgaactcatttcttgtcatttaatgatcatttatgaaatgtcatttaatgatcatttcttgtcatttaatgatttaactctttcttgtctccaagcaattgggatgaaggaatcaagtcttagagaaattaaggagttcatctaaggtcacttagtgttatggatgaaattgtgtatcccatattgaagctgtaacccccagagtcactgtatttggagataaaaactttaaggagataattaaggtcaaatgaggtcataagggtagggccccaatctgattggactggtgtccttataagaagagacacctgatcatgcacatacacgaactcacacacattctctctccctccctccctccctcccttcctaccttcccacccacttttcccttcttcctccactcttcctcctcacttgctcttctttcccttcaattgaaaatttttattcatttttcaagctctacatgagaagtttggaatcattgctgtggaggaaagtgaagtcacttgtgggaccaagaaggactttatccttgctactcacattgtataccactcccccgtccaacagcagcagcaaggctggggagcttgttagaaatgcagaatctcagccccaccccagacccactgaatccaaatctgcattttaaggagaccctcaggtgctctgcaggcacattgatgttgagaagcactgagctagaaagggagaattgcatgtaaaaaaagtttaaatataaaatgctcagatttttaaaaattatctttggaagggcttttaaattaatctgttctgctgatttggtctttcattaataggtaaaagttgtagaaactgaggaaggcacaatgctgacactttcttggccactctggggaaggaaagggtgatgtgcatgtgtgtctacattttatgcaaattcagtacagtcttcagctccccagtggagacctacaaaagcaccatcctaggaaggatgagtcagaataacaagagcaataggtattccattagtttgagcttcctgtcttaagctttccatttcacagcgttctaattacttcaagtgtaattacaggcttttaccctgtctctgacttcattagcaagggaaggaatggaaggagggtttcagagagagttttaaggactgcttgtgtattaattatacacctttgcctcatctcttgggtaatgccttgtcatcattacaaatgacccagctcagttattagtcagaggccatctgccccacacttcacccccatctccgcttctcatctccctcccccggccacaccaggtggcagccaggagaaagagaaaaggacccacatcccctagcacctaatgtcctggccagagcattttgtcgggtcaagggcacatggtatcttttcaatcactgcctttggtgggttgtgagttgtcttcagtgagacttgacacctgaatgttagcagttcataggtcagaagatgcttgaaggaattctttgaccgtttttaagtgaaagaggcaaactcccactttgagatactatagttaggctaagtatttttgttattactttttcaagggaaaaagaccacaggctcaaaaataactaaggtcacacaactattaaagggtcataataaacactactttgaaaacaccgattatgtgacagctaccgctgtaaagtgccttatgtatattgattcacttaattctcatgacagctctgcaaggtaagtattataagcttacgtatgaatgagaaaattgaggtatacagaatcgtaaaccgaaattaaaattctaagccccctgaccatctgaatggattcctcctcttggccaagggcattccaaagttaacctaagaaaactagtttaggctatgataggaagggggagtcagacatgcctcattataccctcctcccttttgggattcaggcccagctgaccagcattaacatcaacatagactttaagactcttcaagtctgataagaaacatttgccatcttttctttgacgcctgctgcctggatgcttcatctgcatgataaaatcttggtctcaccaaccccgtatcttaatccaggcattcgtttctattgattccaagtctttagacaataacttaactgtttcaacccactgccaaccagaaaatttttgaatctatctatgatcccaatgccccccaccccacttctagttgtctcacctttccagactgaaccgatgtatatcttacatgtattgattaatgtcttatgtctccctaaaatgttgtagcctgaccaccttgggctcatgttctcaggttttcctgaaggatgtatcgtgggccattgggcactcatatttggctcagaataaatcccttcaaatattttacatagtttgactcttttcattgaccaaatatattcacttgctagggcctccataacaaatgaccataaactctgtggtttaaaacaacagaaatgtgctcatggctctggagggaaaaagtttgaaatcaaggtattggcagagccacactctctccagaggctttaggggagattctgcttcttgtctcttctagcatcttgtggctgctgcagctcctcagcttgtggctgcctcactctacctccttcttcatgtggtccttttctcttctgtctctcctctgtgtcgctagaattggggcccacctggttaatccaggatgaccttctcgtcttgagatcctttacttaattagatctgcaaaggctctttcaaataaattcatattcacaggatttaggactcagggtatggacatatatttttgggggccactgtttagcccactacagagagctgagtaacttgctcaaggttccatagccagtaattagcagagctggggtttgaatccagacagtccagttccagagttcattcccttaactgctaaactctcctgtctctgataaatgacagaggcaggacttgatcaggccctgagctaaaccttacaagatacacaaagaaattcacactcactctttatcctcaatgaacttaccattgaggagagttccctcttactcaaaccactacaagggccactgaaccagccccctagcttcactcttgctatagaatggtacagcaagcatcacatataaggctccaaatagtctccctggtatggaaccctgggcagattaacctctctgagcctcagtttcctcatctgtgaaatggtactactccatgggtttattgtatatctaatgagcattaacaagatcccagcatcaggcatatacaaatgtttgggaaatgctattttcctcttcttttctctcccattcaataaatccccatgtagagataattatagtcacctattggcttaggggtcctggctgtggaaggggtgaaaaggggtggatagtagagatatttgagacactgaattgatgggccttcatgactgattgatgggctgtgggatagagagtgaatgagagccatgaggaaaagctcctagggtctggacctctggctcctgggaagaagaaggagctactgagtgagtaggacacattagaggaaggggaagatggcaaggggtgtggagagggcaagaggagatgaagagctttgttttgggctgctgagtttgagatgtctgtgagtcatacaagtggaattaatatctagagaatgctgaatacatgagtctgggctcaaagaagagtcctgagctaagagtctccaagtatagatgataaatggaagggcaggagctgatggaggaatgtataaagaaagaaaagggtgtgagagtgaggcagtcttccaagctgagaaccacagtgatgtctcctgtcttcactgtaccctcagcctctgaataaaccttctgatgggaccagtccccaaggccaagggggagctgagggatgacacactctcctctgtgtcttctctgctcaggctggggatggcgaaggctctgtggggggacattcaactaggacagaggctgtatccttgtttttgtggtgatagaagcttcaaaagaaagtgaaaagttggaggtgttactgaggatgcaggaaaaaaggcacctttgtgcactgaaaggggcagtgtaagttgctacagtttttctttggggatatttggcagtttatagcaaggaccttaaaatgaatgctcaaataatacactgttactaattcattctaaaaaaaatcagtgtctgagggcataaagatatatatatatatatatatatatatatatatatatatacatacacacataataatataatactcataaaaatgttataattctaaaaaactggaaacagccttaatgtccacggtaagtggacacattacatgaattctgatatcaggatgtttagtagttatctcttaatggtaggctttttattagttatctctcaatggtggtgattttattttttctatttctaaatagtttttgcaatgagcctatattatctttgcatacagaaaaacaataaagccatttcctacaaataatgcaatggagggacggaaaattcttgcttggcttaaactgacgtcatgtgggagaatttcttgggtgtccggaggaagagcctgggatgctggtcccacagcctctaacagagctgaaggagagtcatagcagcaagagatcccagcagttgctagagtgccgtatctggtgaacgtggggacccaatcatttaaatgccctatccctgtggatccattggtgatgcaggctttgcagatgttgtttctcagcaatcagccattctctaaatcttgtgttaaaagtgctggcaaagaggttgttgcagactgaccaaagcatggaactgtttagtagttgaggtggggatgttatctcagagccagaaggctcagtttaactcatgcctccctcattagaaaatcgtgtgctcctaagcaagttacttcaaggttcaaatgcttagcagcaaaatgaagaaataatgacacttaccctcagggggtttgtgaggattaaatgagataattggtacgaagctttcagcatagggtctggcagaatataagaactcttgctcttccctctgcctggaacacttttctggatgtctttacatggctcatgcccacacttttacattttcttctgacttcctgacattcctacctaaattagcacccagtcctttcccgccaccctctatttcttatcccatgtgtgctttctttcaatgagatcattattatctgttattgtatcatgtaggaataggtaagctccatgaggcagggctttgcctcctttgttcacaactgaatctgcagtgcctacaagagtgtctggcacatagtaagttccaataagtggataaagaatccatatatatttatttgaataagtgagtacatgtatattagcttttgattattattgagagcattagatagatgcattattcattgaatacatatcagttattttcagattattgttacccttaactgccatataaacaatagatccatgtcaagggaaagatggggtctaactgctatacatttcttagaccttttggtccaagagtattttggtggagtgtccatttgcagatagatgttacaggtctgcctgagctgggaaaaagacactttttagatataggagtcaatttatcaacttgtgaggaaggatacttttatcctctctgtgggcagttttacagtgacagcatatgggaagaactgctactctaccttttcaaatttacacaggcttgtagaaattgaaagtggcttagtaggcaaggtagtataatgagaaggcaggtattgaaatcagaacaacttaggtttgaaatttcgctctgcaacttactgtcagtgtactctttggtgaatcagttgagctcccagagcctaattcataatttatcaagcggggcttcacataacataatatctgagatataacaagaccccctgaaaatcagtttcttcccttcgattgacaaccaaggaggaagtcagtgggaagacctggggcattcataaagggacaagaatctttttctcattaagtttataaaacaaaagctcagaggtaatgtagcttaaaggtaagggaaaagtagcttagcactctgactgaatccaaatgttaggtgttaagcccttcctttgccacttcaggaggcatgtaatcttggcctagtgatgataataatgatgatgatagtgttgatagcaccaagctcatgattgcctggcatgtgatcagctcttactaaatactagctatgaaaatgattatcatcaagtggtcgtaaaatatattgtccaaattgggacacttttgaaagtgagagggaacagtgttaataattaagccatgatagtaagtgtaaaccggacaggcaggggcaaactgagtcataggttaccctatcattctcacaatacctgatatgtaaaagtgaattcccccttaaagagtatttaagcattgtccaggagcaccagagagcagcacagagatgcctgctctggttggctaaactcagcactgcttttgtcttctcaattttaagcttttctgattcggtcttgctgactggtgccctgtcagcacattcactgtaataccagttttactggtttgaatctcagtggggagagagaagtttgggggatatgttttcctttgtttctgataactggcttgaaaacgtgtgctggcctgagcatcctgatgagcagatgctgaagaagagtgagggaagcacgagtaatcagcccaccctgggcttacctggatggagattaggcccaagagcatgcacctttgctgacctgtgctcacatgggaagggcccttgacggctcatgttccatgcaaaacaaagctaattaattcatacccggcctcattttgtctgtgaatctgaaaccaagactcgtgggaatgcttttgtaaaccaagcagttattgttttcctccccctcaactttattaggttaatttaaagtaaaactattctctttcccaaataaagcttgaaatgaggagtctagactttggaggaatctcagaacctcattttcagttccagagatgttccttaacttatttgttcttcgtgccccaagccctcctgggtctcttctgtaatcaaaaataatatttcaaaagatcagaatcaaattagcccagccaactctcctccctgtggacaaaggggtggggactaacatctgcaaattgatctttcaaaaacctcacagaaagcacagcttcagcaaatgcctcccccaaaaggatttcctgtaaatttcccaaattagaattctttacaagttttaaagttcttccacatttgtttaaaaatctacacaatgtttacgtgtcttactcctccacctgagtgtgagttctttgaagtcagcatgcgggtcttattatgatgttttgcctaacatttattataatatttttctaatcatagatgtgatatagtttccttttagaaatacaaaagcacagatgtaatttcctacatcatctataatcccacaacctagatgtcatcaccgttaacatttaaaaatatatcctcccagtctcttggcctgtaaagaaatgggtactttaatagttaggaccatatttttaatcccctgttgggacaggttagctttttaatggctacatttgatattcagaaacattcatgataaccaataactaaatttcataagcagtctaaaccaacaaatattcccgaaatcttcacaacttctaaaataattgtagtaaactttatcaatagttcaagaaatctagtttttagtaaataaaagtaattggaagagagttggtttgggggttaatatattatttcgtgaattggctttttggttattagacttcaacaaactggccgtttgccatactatgaattcagtttatagtgttggagtgtttcatgctttagggctaggacaaggacatacatttttatttaaagcagccaggatgctgacaatcgagaaggtgcagcatggcagcatttgtaggggaaacacaagggctgaatgattggaagagtatgtgtaaatgccatggagatagcgatctaaattagatttacagccagtacttctgagctggtggaaatgggattgaaatgaaagctggttggaaacaacaaaagtgggagctgtgggagaggtcctgagaaactgccttatgccacctgccaacccaggtggcataagtggctccctggatgagtaggtaggcccagggcacactgatagggtggtctgggggctgggtgccctgcaccagcctggcttaaaggattaggatcaggacaggctcctgtagctgttttttttttagcattgatacactagtccttgcaaattgtcatccagctccaaagctcttgccctcctctgcaccaatattgagcttgtagaagtatcatactaatgaatgtgagtgtatatggaaaagggcctgtgttaattgtcactaaatacatctttttataactatctttgaaattaaatacagttgttttcctgggggctaccaggtaggtagaatgataccatctatgactgaacgacatctatgactttacatgagataaatacttcatgctgagatgagatgagatgagaaagggtagtggaagggggagagagtgtcttgaaaagaaatgagaatgtgtggagagatgctgaatttcgaaaacaagaaaaggaaagagatgaatgagaatcattgactattagaactggaaggaacttagagatgaatcaatgcaaaatgtttgttctatagatgaagtcaccatatcacagagaggttaagcaaactgcccaaggccatacagagagttgatggcagatcaagacataggactcatgactccaatccaggacactaaaggagatttcaaagtataaaaggaggactccagagaaagcagagggatgtttctaggatccaaagttatgattccttgcctgtttagaagttagaaaaaaagagcaagaattaattatattctccctgtagaaatggggccttctcacccacaaccaccctacttaaatcccagctgcctatgagcagaaaagacagcagtaaaaaaaaaaatggcactacttcccaggatttcttatctagtccacgggagctgagatgatgtgattacttatgacatcattcatcactcacgtggcttctgcttgcagtaattctgcaaagtaagggcaagctttgcatgtgagaagcagaaggagaatgacttccctgctgtaatgtgtaaatttgacttccctgggtcatcaattttataccatgaggatattagatagtatgcaacaaaatgctaacctgtggaatcttactgtgggcattacattgagtttgggtagcaccctcagcatcatcataacacccagtgttcagcaacctggctcatcccgacactaaacctaatacccattgatcaatagcttgtggtctgcccactctttcagggaccactgtgcctgacataatcctaacattcacttatgtcaggaaggaaaccaatggataataagtccatttaacttcatttaatgaatgggagaaaaaactttggcactcaaaatctttaccaagagcataaactgaaagctgtgtacattggcctttttgtagtgtaaactttataaagcaacttttttctgttcaccagatgttttctatgtcctcttcaatttctccagataattacccaaaacactggttcctttcttgattgaaactagtaatacagtgtccaagattcattagcatcctcttacatgaggcattggggcagggcttctcaaagtgtgatgtctggacctgcagaataagcatcacctgggaacttagaaaatgcagattattgaatctctccctagatcttttgaatcataactctgggggtgaggcctagcaatttgtattttaatatgcctccaggtgattctgccacatgctcaagtttgggaaccactgccctgagagaagatggtatataatctctctctcatgaataagggtcagaggactcctgacagcccaggacttcttcaaggtgtcagggatttcccagccccacttatgatgacagaaagcaggaagttcttggctttgacaggtgtcctctgaacttctggaggagacatacactgaagaacagccacacaacaatgaagagaagatgacttcacacagtcataactgtctccaaaccactgagaagagaaaatgcctgcaagaaaagcaatgatgaaacccaggtgcaaccactgaattttgataagggatttttcatcatggttgaagatgaaaggaaggccagagcaatgcaccttctgggtgctgagtttgtaagattttggttttcggaggttgacacactgccattttttaagaagccatattatatttaaagtaaattcagtagagaagcccagagggaagatgatcaagcccatttatctgcaaaaggattcctagtctgcctctatcagctctgtgtaagacaaataaacttaagaagaaacaagacaccaaaaactagccaggtcaactccaatttgactttgcattcatagatgctacttgatcatttatactagttagtgacaagctattagaatagatggaaaagattatacagggctttggagctaaagagatcgacaacttgctgtgtgaccttggataacttactgagctttactcagtctcagtttcctcagctgtaaaatggtaataatggtagtgcctacctctcagggatgttgtgctgattaaatgaagtgcagtatagcaacagcttcacccagtgcctactaaataaaagtgcctggagtttaaaaatttctttaattatttttcttatttatgactcagttccactgtctttggtggatgaagtgggaaaatatgaggatgaatgaatgagttaataagcagtgaaagagaaaataaatgcatcacattaaagaaggtcagcttgctgttctaggcagtgaaggatcacatctctctttggcgtacccactattggatgtagcagaagaggggcttagctccttgatttcttttgggcaacagaaatctaaggaaggtctcaaaacttacccagaaagaggcagcttctgagtaccctatgtcctcgtgatgcatccccctcatccatctgtcaagaatggtcaattctccttgagtttccctgaggacctcagccttctttgctttatttggcatttttgctcagtgtgaagtcacttgctgtgcttatactcagctttatgaccaatgccagtttctagcatgcttaaggcttctattttcctttcctaaaggccaggagtcctgctgtttcacaaggctgagtgagaatgtggcaaactcagccagacagagcgagtactacagcagccttcaggaggcagactctgaatgtgtgagttcctgtgtggctttggggaagtcactttatctttcctttagggccttaactgtggcaatccctatcttgccacagttaaggcccaaattaaaataattgccccaaattatttcagagacctgatttaaaacaatttttacttaaaaatagtatcagaagaataaatacacgtgtacgtgtgtgtacacacacaatatttaaaatccaactcagtaaaatacttgacaaacctgagcaatgtaagttcagttttactattatactcgcccaggacgtaggtgctctctcacaatgttttcacgctgtatgtttccccctttgttctgaaaacatgttggtctctacaagcattgcctcttcccatcatttcctagattcttgccacagtaataacagcttccccatcccgagtgctccctccatgccgggggctctgttaagcattttatgtgcattattctacttgatccttgcaatttttcttgaagtcagcactattattatttccatttttcaaatgaagaaactgaggcttaagtggctgcaagaatttgcctctggacaaacaagttgagagcagctgagctgggatttgaccccagaccatcagaccccacaccatgtacacgtcagcactaggaaacagtgcctcagactctgaccctgccctgcccgggggtgcccaacatctgcatctagccattccttgcctatctaggcagaacacaggaagaaggaccttctttttactctggagttttaaagaaggaaaatgttgatgttttttctttttgcttgatcatactggagaggagcaatttagcgaaaagagcaaaacccccattcacgccaaagtgtcaaaacctgtgaaaccacaaagggtaaaaagttctgcctgtccttcacaaagcttttagtacaaatgcatttgtctggcatattactccatgtaaaaaacactcaacaaaggttttttttttttttcttaaagacaacatcgagttcacacttttatctgaaagtggaaagagatgtccttacatatgccttgattttttaattctttattatttgtttatatatggcacgttcaaaaaatttcctttcaaaagtaaagataaaacagcctcctcgaagaatctcatccactctaatattagcagctatcacctatagggattaagctcccacatctatattgtctattctatattcatgtcagctgccgattgtcaccctcctctgaattctccacagatatctgcatttaataggccagcatcatgttatattcctcacccccatcctgggcaagattgatttccccttaaagacagccaaatcgctcccccagttagctaagccagacacctgcaaactccgcctccctcacctcatctccaaggcttgttgattctgctcttggacaggctcttttctggccccctcttttcagtttacataactactgccgcccgcatttccttcctgttattgcactagtatcctaattggtttccctgccatccaccgtttatggggaatgccaaagtgatctttcttccttccttccttccttcctcgctccctcctttctttctttcttttctttctttctttctttctttctttctttctttctttctttctttctttctttctttctttctttcttttctttctttctctctttctttctctctctctgtctctctctctctctctgtctctctctctttctttctttcttttgagacagagtattgcactgttgcctgggctgggcatgatctcggctaactgcaacctctgcctcccgggttcaagcaattctcctgcctcagcctttcaagtagctggaattacaggcgcctgccaccatgcctggctaatattttgtatttttagtagagatgggtttcactatgttgtccaggctggtctcaaactcctgacctcatgatctgccagcctcagcgtgcttggattacaggcgtgagccactgcacccggccaaagtgatctttctaatatacacatccaatcttgtcctttccccagttaggacctcagtgcatcaagtccagtctctctaaagtttagagaaaaacacttaaaagcatcaggaccaggctttttcttttctatctggcatcctctatccttttcacatcctcacttgaccgctcacccacgctaagtcacttaagagttctctgtcgttcccttcatgctgctgtgtctttgcgtgtaccagtcattttgtcccaagagtccttatttcttttctctgttggtgaattcctacttatccttagggattcagatccagagacacctttcctgtgagactcccctgcttcactttaggtagaggtctttcccctacagcccttggattcacatttctattgtagtgcttagtaatatgcattttgagtatttatttaccagtctgtgtttctcagataattataagcttttctgaggcagggcctctgtcttcctttttcatctttgtgtctccagcacccagccaggtatacttggcatatccagggtgcttgctaaacgtttgttatgaaagcttggcatgcaattgctatgtcattaaaagaagaaataaacgaatgaatgaaatctatagtgttaaaggagtcatcatgtctttccttgagccaatcactgtggccacacaaatgtaatattctgtgcctacccaaaagtgtgggaaaggccaaccccaccaatcacctggctgacaatatgagagggtggttgccaaagaacatgcgagatatccagagaggccagcatgtcacctcaaagtggatcagtacagtttgggaaacatggtttagagatacactgaacaagtcacttgctgctcatttgcttcatctaggccatgatcttgaaggagttctcagaacaggtgacctcctctcatccttccctaggtcatgacagaagcaagctctggattaagaatcaaaagctcctgacttccagtttaggccctgtcaagacattaaatctttctgatcttcagtttcctcagttataaaatgtagataatgattcctgtccttcccaggctgtcaagagggtcaaatgaaatgatcagtatataagttctttcaaaagtaccaaaaacgtatcttgaaaggactatttgtaatctcattctcagtgctcacttccacacattccttcttttgaaagattaagaaaattaatccaacacaaccccctagtttccctttgttcaccccactccagccagcctgtccttctttttagttcctcatatgtgctatctccatcatgatattttcagttcaaggaataaaaattcccatgtcaaacagcttcaatgacaggacattttattttcccataataaggcatccatagatagagtgggtcccaggtaaagaatgtcaggcccatccctccacatcttttgggtctgacctcccctaagggtcactctcatcctcagccttgctgcaagatggctgtagtggttccaggaatcacaggcaaagaagaactgtttcttcatgcgtgtctcttgttttaggctaggaaacctttccaagaaaaatccacatgtcttactggacacacgcctacctctaaaccaaactcttgcaagtgggtgatgagattcatgtgattagctgagatcactcaggattcactcttgagctagggatagggctcttttctacatagacagatggtataaaatgatcagaaagtgatcagagtcaacagctacaagagtgggtgattgggtattaaataggcaatccacagatgctgtcagctccccactcatgttcccaggccctatgacttgagtgcccatcactgactttgaccaccggcatctgtatttctttgcttgcaagctctttgtgatatttggagtttgctacctgcacagtaggccagaaatgttggaggactggaggattaatgttcccaccttaggaacaggaatgggttttttttttttttttttttgagacggagtctcactgtcacccaggctggagtgcagtggcatgatctcggctcaatgcaacctctgcctcctgggttcaagtgattctcctgcctcagcctcccgagtagctgggactacaggcatgcaccaccacgcccagctaattttttgcatttttagtagagatggggtttcaccgtgttagccaggatggtctcgatctcctgaccttgtgatccgcctgcctcggcttcccaaagtgctgggattacaggcgtgagccaccgcgcccggctaggaatggttcttcatggctgatgtgagtatatatacacaaagtgtataaatgtcccagttccctcatccacaggatgaaatatctgtaatgtttgcattacactgctctcagaatttccccagcagagttaagctccagttacgtacggtggtatctacttgaccactttcccttgtaggctgcttatcctgtctcacttttcctctccactatggcgtttccttcacctcctttgacttcttacctcagatttggcttcttggaaaaaccaaatgaagatgctctgcaccatatgccaaactccttcctgaatacagaggctttgtgtataatgttcccatctgcttagaatgtgtttctctttcttctcacctgatgcactctcactctcccttcaagtcagtataaatgtcacttctcttagaaagccttatttgatccctctctctgcctgatgccagtctcccaatgcttgctctcttattctgtacttctctgtaacaaagcttatgataatcgccatttaattaattgttgtgtaattattttcattccatctttatccccaactaaactgctgcttgaaggcaaggattatgttttttggctcaccacagtgtcactggcacctagcataatgcctgtcttacttgcaaggttaaggacttactggcttttggaaagatgagccttgtgagggactaaagatttgagtttgagggtcattcaaacagataaaattatcaaagctttggaccaaaaaaaaaaaaaaaaaaagatctttagtccacatgattcccacacggatctacctttttttttttttttgagacggagtcttgctctgtcacccaggctggagcgcactggcacgatctcggctcactgcaagctccgccttccgggttcacgccatcctcctgcctcagcctcacgagtagctgggactataggcacctgccaccacacccggctatttttttgtatttttagtagagacggggtttcaccgtgttatccaggatggtctcgatctcctggcctcgtgatctgccctccttggcttcccaaagtgctaggattactggtgtgagccaccgcgcctggccggatctacctttatttcttgtgacaaaatataaaatttatgcataggagggatgcccattgtttaagggagaatcttggcatggcttacatgtctataaaagatgccattttaatcatttttaaatagaaacaggatttcatctcaaatccacaatgcatttattcatttaatacctacttagtggacattgtacctggcaagatcctttgaactatctgccatcaactcttcaaaagtcattagagaacatatgttaatggagaatatttcagattctctttctgtctcccctcaactgtatttcagtattgggcttttgactttcattaaaggaataagaaaattaatcactatattttctggaaaaggggaacagaggacactgtctattttgtctcttagtgctcactgggagaaatttcttttagtgataagtggcatgaagcaaggtaagcacaaatgaacaagcaaatatatatgcttgccatctctttgtcaggtagactcttcctgacaaatccttaaacctgacccttaccttgacaggaggtgaacccagattttgtgggtcttaagacatataatttggaatctctctttgagaaaaaaagtacaaaataaaaatgtgacacagagccatggaaggggcccacatgagagaggggatctgatgttaaagcttcatcaatttcacagtaaatcagcatcttgattcagtcagggaaagtggtctcttcccaccccatacccccccacgtttgttctgacccctatgagttgcttatattgctttcttacttggaagtctcccctcctctttcttctgcaatccctagataatgtttttttcagattttggtgccacaatgccttctttgactctacccagtagaaaaaagctctctcttcctttaaggtctacgaccttgtatagagagcccagggtattttgtaatgaactgctctatttgaagtgcatattactatgccttctccagtaagattatccactatctgggcacagggactgtttttactttttgactcacttactgcatttctgggtacaacaaaaaggaaaggaaaaaaggaaaagtattacagaagcaaaatgatgaagtttagagtcaggaagacctagtagagtcctaacactgctacttattaggtagagccttcatcaaatcacttaacctctctgagtctcaggtttctcactgataaaatggatataatactgatatttatttcatattattgttggaaaattaagagcttttattcattcactgagtatccatttagcctctgccttgggctatttttggtaccagagatgtcgactaaatgtgaatgagaaatacttgctgcataggggttctcacagctgagttggagatggaaatttatagtgaaacaggataaggctataacagacatgtgaaaagagcatagtgccagacacataagtgctcaataatagttgttgaataaatgagtgacacagtgggggaattcagaagagaaagttctgaatttttcaaaataagaaatcgtacagacttgcagaatcatctctacataaacataatggatatgacaccacctgggaagttgtaaaatgctgcatgttaaagaaaatacaatcaataggaaaaagcaaggattagatgaaggaagagagggaaagggggcaggaagaaaggccctaggatggcaaggaggaggaagggatgtctgttgacccacctggccaagtgtgcactccatgccaccaaggaagtcggcctccttcagcccattgtggttgctgctgatgtcatggacttcaaaccgcaggcgctgcacctcctcaaagtaaaagtccacagtaaacagttttgagtacactgggtttatgcaggtgcgaatcacctcagtcctgtcaacctgcaaggagaaagagaaaacctatcagagataaggattatttttattattaccgttcaagaaaattcatctcagagcacttcccttcttcccaaccataaatgctccccagcaagtcattgggtgggcagtccaaaagtacaaagtacaggcaataccttcagagaatgagacgagttttagggaagaaaataatgttagacatgtaaataacttgaagatttagagctcattgtatgagtttgcattatacaaaattgtatcattatatcattatgtcattttgttgatgggaaaactgaggtccagggaattgaaatgagtgggtgaacattatgaacagtaaaaatttttgagtacactgggtttatgcaggtgcataaatgattgattgatgcatttcatgattgattcaaccttgtcctgcctaatgtgcctgaggtcacatctaggctcaggaggaaagaaatctgtaattgattagtgatgtctggtgggcacagtaatggagaaagtgctatgtaggtgtctcattttagccaactctaagtttcctaatccatgatttccagcataatgaagtagaaaaaccatgagaatagataagacaataactgcctttggtctcgagtatgccctttattaagtgtataatgttcacccattcatttcaattccctgggcctcagttttctcatcaacaaaatgaaaattagattagaggttgaaaagttcctttctgctctaacattccatgagctatgatttcctttgtcttctgtgataatagtttttcagttgtccccctctctcagatattaatacatctctgccactttctgcactattctgtgacataggagactgatgtctatggattgattttcctggcacccttgccctctgggttctggttggagtcagccaaatggaggacttcgcaggagatcagagaatgggagaacagagaggtgcaggcatgcctctatacacacacattctgctagcagacttccttctgcacagggagcttttgctgggatttggtaacatagtgcctctctcttgtcccttcacattgaggggtagtaatggcttcctgttgttgctatctctgatgtctcggatgcctcactttctttcttggctcttttaaccctgcccattcccgtgtacagagtttagtcctttaggttaaactgtttgggtatgccatctgttttctactaggatccttatcgctaaggctcttttcctacatacttgtcacaagtaaaaatatacaaaaccatttatattttgggaagcttttaaagactaagttatagataacccaagattctatagcatccctgtactagagatacccatccttcctattttacaaatcaactggaacctctatgtactgtcagctttcaaatagaaatatggtttattggatgttttctgacatttgttagcacaaactatgaaaagcatttatctcactttcatatgagtaaaggaaaatagtctctcaataaagggaaagcagttcttaaccatattatgcatgtccatgttgcctagcaaagaaaatctgatatttgttctagccacccctaacattcttcagttcagtgctttgtctccagccctagcccttcctatgcagggatgtatgtgagagaaaattgtcctttaaggaacactacctgccattattggttggatggacaatccgggttgcaaggagaagagtatgattctgattatgtccccatccaataaataggcatacagaaaaccaatctccagcccattgctgactagaattttacaagttactgttctgaccaaaggttatctgcctgttccagcttccccaggaagacccagcttctatttgagctaaattttatattcttatatgatgttcattcagagggtgatgggactgattatgccactggccatttgtgcaggtacaagaatttactatatcagcataatttttctgttgttcagggataatagttttgaataatagaaattagagatcataaactggtagtctgcagggataagctgacttgaaggtactttatttgtcctactcaaagtatttttcccttcattttcccacttaataaggtagctgtttttattacccttcctttagaaaaacttggaatatctggcaaccttgggccacatttcttcatggcaacaattggagactgtcccatttagacaaagcatttactcttcacttctcacagcaacttccaggcctttctccttcatttaatttctcttcctggcccctagaggcatttttgcaacatctggtccaaattcatgaaataatgagccatataagagatttaattatatttatattgtatcttttgatagaggatttggaaataaccccaagaagtatgctgtgggtgcatttgacatcctcaagacacaaaaagggcacctgctctccttgttgctggaagagagtgctgaataggtttagatgatagaagacaggtgatggaaactctagtctttgttattctcctttaactgccccaaagggcacaaataagtgatgtgcaccaattctggtacttttcttctaacttcttgattttccagtggcattcccttataaagttcatgttggcatcaagccacacacctcatacacactatacaaggtaagctgccagcactgagtgacttggttttttgagcgaaatgacaagatggaaagacattaagtgataaacatttgtattagcaagacagacgatttccaaggataatcagaaagccactaagaatcctgaatataactgctcaggaaaagcaggaaaatgacaataagcgaagtgcttgcaataataaatgcatatttgaaagatgttttaaaatattatgcatttccagttattatggaagatgcattatttttttctggtgcctaatccaggtttcacatgagcaacagggcctaggattgttcatttctcattgagaggcatcagggtcaaggcagtttttcccaaaagatcattcacttactggtgctaccagctgcatcctaatcaactggggggggcgggggggctttctttaaaactcagattcctgtttcctaaccccaggtcattctgatttagtgagtatatggtaggacccagaaatctctaaaaaagtgttctagagaattctggtgtgggaacatcagtcctaggggaaatgaggagatgtagagtctatctcatgctcttgtgtgaggtcaagttttattttaatcttgcttaccctctgttatccagtctgcaaaaatgtgaatgcttatcttctctcttccctaatcgtgatgactgataaattcacattgctttattgtttacagaacatgctcacatccatttttaaaatttgattcttatggctatcatgtgatatagttgtatactattttacaaatgagaaaactcaaggttaaatatcagcacaaggtattgaatgtcagagtgggcacttgaactcatgccttctgacctcaaagtctggactactttcctcaattcatgagcatccttagaaaggaaaaaggcagctagattatggtgtgatggtgagagactcaaccattgaatattgcttctcatgagaagcttttaaaaatatctaaaacacggccaggcgcagtggctcaagcctgtaatcccagcacttttggaggccgaggagggtggatcacaaagtcaggaaatcaagaccatcctgcctaacatggtgaaaccccgccactgcactccagcctgggcgacagagcaagactccgtctcaaaaaaaagaaaaaaaaatctaaaacatttttcagtctaataataaagtcaataacaactaacacttttggaaggcctgctatcatggtgctcatttaaaaaaaacagcattattgaggcataatttgcatataataaaccacatctatttaaagtatatatctatttaaagtatacaattcaatatgttttgacacatatatacttgtgaaaacatcaccacaatcaagagagtgagcatatccatgcacccaaatttttctcttactcctatgtatcctcatcctctcaaccttccctccttccattcccaagaaactactgatctgctttctgagactacagtctagtttgtattctttataatattatataaatgtatatcataatctgtggtcttttattgtctttaatctttcacgcaattattttgagatttattcatgtggtcctatcagtagtttatccttttattgcccccagtcaattacagatggacatttgaattgtttacagtttttggctattacatataaaactgcatgacatattcatgtacaatcctttgtatgggcatgtatttcctcttcttttgggtaaatatgtaggagtgaaagagatttttgcttaactttttaagttctagtaggtgtggagtggtctctcattgtggttttaattttcgttttcctaaaactaatgatgctgaggctcttttcgtatgcttacttgccacctgtgtatcttctttgatgaagcagcttttcaaatcttttgacaagcactctgttttcattcttataacaatatgaggtaggtactgttattatcctctcttactgggagatagagagaccgccataacttttccgattttacacaacttgtaggtagcagaggtgggatgtgaacctatgtagttaagctccagaacctgtgtgtttaacctctatgctatatagttatgcaaatttgaagcattttttcataaacactgttgctcaaagtaatgcatcatccagacgacaaacataaaatgtggaactgatagggaaagtcaatgattgaggctgcagttgtgtctctggagatctgatttatccactggacatatttgagatacagtgggggccctaaacactgcccatagaaattggattgtgtggccgggcgcagtggctcacgcctataatcccagcactttgggaggccgaggcgggcggatcacgaggtcaggagatggagaccatcctggctaacatggtgaaaccccgtctctacttacaaaaaaaaaaattagccggtcgtggtggcaggcgcctgtagtcccagctactcgggaggctgaggcgggagaatggcgtgaacccgggaggcggagcttgcagtgaacagagatcaggccactgcactccagcctgggcaacagagcctcaaaaaaaaaaaaaaaaaaaaaaaaattggcttgtgtgcggggcaatgtgtcatcaacaaacaattcaagactatttgtacaatggccatctattctctgggacttccaagggctggaactgccacaggcaaagttgcgggagaggtgagagctaaatcgtgtgatgctatcagtggggaggaggtgaaggcaaaagccaaaattattgtcagtcactgaatgctctaaggtttcctggagaaattcaggcccttatcatcccatgggtaataggtcttggtaaagaatgacatcataggccagagagagacaagaggccctcagggcaggcttataattaggtattccttcaaactgatattctttaaatattttgtcaatatttatttagtgagggtagggagaaactaattttctctgaataaagaatggctttatgtttaaaaataaaggatttattacaggcaatttttcaaaccatgtaacttccaaggagacatattaaaccacacaaaagttagataataaaatgaatcaccaagccaccagaaatagcattattcaatttcaggatttcagctgcttgtgactgctgattttaagtgactggcctcagagttagtggcttgttctgtagctgcaacaaacaagttgcagatctcaaaatcactcaacagagagagataggttggtgctgatgagacatggttttaattttcaatttaaatggattttctactttgttaggattaaaactccttaacagtttgctggttgtgtaaaaagtctcatgtggaaacttgaattgatttgtgccatttctgtgtgatatgtctacatactgaggttgcatcatttctggctgtctggctgatctgccacatggaccaggggttcctgctcactagttcctaggactaaaaaaatgcctgagtatttgacagcctttgtttctccttaacaacttgggtggaagctgcctcctgcctagtaaattattaaattccttcttgaaatggatggcaaattaggtggtgaccgacagtgatggtaacttttctgctcaggcagaaggcacttacatgttatcttcttcaagccttaccctcatcaactttaaaacatacttttatttcacagtttgatatatttgaaattggtatgtgtgttttaattatatgccattgtttaattggaatatatttgaaattggagtgcatgttataattaatgatataccattgtttaattggaatatctctgaaattgggatgcatgttgtaattgatgatatattgtttaattggaatatctttgaaattgggatgcatattataattgatatgtcatagtataattggaaacaatttttttctttcctagggaaacataaaaataatggttcattttaacactgatttataattttacaaatgatcctattaaatatatcattctaactttgcaaatgataaaataaaactgtgtatcagaaaagtagtggcaaaggtaagactcaactccagtctttctcactctagaatatatgctctttttattatactatgtcatttgttataggttgagttttatccctcaaaattcatataccagtatcttagaatgtgacttcatatggaaataggattgtggcagaagtaattaacttaggataaggtcatactggagtatggtcggtttctgatttgatatgactaatgtccttataaaaatgggaaattttgacacagacatgaacacagggagaatgccatgtgaacacaaaggaagagagcagagtggtgcaatctcttgttcctcagcacaagccaagaaatgccaaagatttccagcaaaactaccaaaagccaggagaggagcattaagcaatttcttcctagtaaccccagagagaaccagttctgctgacattctgatgtcttgatcttggacttctagcctccagaactgtgaaggaataaatttctgttgtttaagccacccagtttatggtactttgctatggcaaccctggtaaacaaatacaccattctacttaagaaacatccagactggcagcaccacttaatggatatatctccaaaaaagcactcttcacccatcaagcagtaaaaccttcaaatactccagattaaactgaacgagtgatccagcatgacaagtgtctttctcccactttcaatccattgaaccctgccttcatcctcctgccatgcagttaacctggttctcaagtaacagggcctctggcacactgggttctgcttatggatcccctgggatgaacatgccggagaacctagagctagacattcgtttcaccagtagacatagcctggtacttatgctattcaaagcagacagcagggttgcatccttgcttaggaatgtggctcagaagtaaatgaaatgagtatcccccgtaggcaccatcagagaggtctcaagtgctaatatgttctgggtcttccccttccttcgttggcctcctcagtaccttcaagctgctggctccatccacacagagcatgagcaaatcctgcctgatttgccacagaagcgtagatctcagctacatcttccagtgccaaatgctgcgtgtcctctatagctgttccttttccccagtgtgagtgtccagtttgtgaggctgttttctgatttctcggtttgtatgcctcattgtcttttgccccagtccactcagcttgaggggtttgtcactgtcctagtgctgtgtgatagaactttccatgatgttcttcatggtccaaactagccacatgtaggtattcagcacttgaaatgtggctagtgggactgaagaatggaattttaaatttaaatttaaatagccacatggggacagtactgttctagcctgtgccagctctatcttgctgtagtttagtgaaatcctgtataatacacacacatttaattggcctggagattcccaggtgatgtcaacatatatactagtaattctcaaacttttcttgcatcgaaaccacctggggatctccaaaccaattaatttggaaactgtgtgggggtggcggggaaccaatgcatcagcaatttaaaaatctacccaggtgattccaatgcacagttaagttgtagaaccaataatactatattccaactgttatggctcagctccaaagtggatgacaaccaggaaccagggctagtgtgtgatctactctgaataccacaccccaacctctggatcagaccttatatgctaatactttcctgcttctttgaaagctgccattttgactgctgcttatgtcactataggacataaggaatgaatgaaagaaataatcgtattatgggcaaagttggtttatttggatgttttatccaatcaagcactccattaactggcacactccctatttgtgaaacaagagttagtgaatatggtatccattctcctttacatccccaggtctttctgctctgctatgtaccaggagaccagcccacatgtggattgtttcattcaggtttcttggcccagctcaccttctttcagccaatggaaagcaccagtaggagactagaagacaggaggaacccatggtgtaccctctgtctacaggccctcctagccgcccttcctgcaaagctccagctctccctgggttccagtaacactgccaccgctgtctgcccaccaagtccctctaatagtagcttctgactattgctagtcccagggcatctcagagtctcttgctggttcctttaaccttgcccacacatcttgaagcggtcccttcatgaacatctctttttctgctggaactttgattgattccttaatgctcttaaaaatgtttcaagatattacagaacctggaagagcttctaaatctcaagggcaggtgaaattgtgtccattctgatggttcatgattaatgaattatgggcttttaaaactttgaaaacttgtaatccatatgtgatttttgtggtaacttcctgttagtgacaacaccatatttcccaatgttactcaacaatggatcataaggagcatttactgagcaatgggtatgcaccaagaattatttaaaccactttacataccttattccacttaatcatcccaacaactatatattatgacttactgttttacacatgaggaaacttagaaccaaaaaggttaacttgcctaaggtcacccagctgtcgagtgatggaactacttgagatttcccttaaagctgtttcccatgacatagcacctctcttgaagaagacaaatatattcaggtaccatctgaccacagcaatttttcaagtggggccattcagaatgctcaatgctccaaacaccatcgtctgggcaacaaaccctgaaaagtctcttcagtgtgactgttgagtgtccagcacagtgtttaccaatcttcaaactttctcttcctcctcttgttatattttgctctttaagttccttccacttggctaaagcccccctagaatatctcatgagaaatcaaaatgttccaggccagaggacaagatatgattctataacatagaagatgtttttcagtcctaaatcaactgccgtataccccccaactccagctgtaagctggcacataaatatcaagcaatcagaaactgcctcacaaaattcatgcctgcctgctaaaagcaggcagagcctgccaagattgggagcaggaaggtgttggattgcagtcactcgaacttgcagtgactgtcagatcctcagtttatagaagctaggagtctaatcccacacaagtgtaaagcaattttcacttcactcagatgttggttattaacaggatgttcccaccatctcatttctctgttacagctgtggagtcctccagagaggtcacccgaggatggagagccttggttttcttattaattgatgtttaaaaatagtgaagaggaactcatctgcgggatgctgcatatgcaccccaggtctgacatgctcagcagccagcagattgggaaggtggccttgctgaggcctgcctcaaccctcctcacgataggtgttccaaggaagggtgaagtgatgggggttgccctgaagcttgggatcagcttcctcgggttccaactccctctccttcaccaagtcctttagaatcataaatttttgtcctgcttattagtcaattcccaattgaccaaattgtgaattagtcccctgatccaagtggaccttctccaaatgccactggttagggaggagcccttcaccctatgcccacttctctttcccatggcactttgttgtaaatcaggaggcagtcacccctccataacactttgctcttaccatgaaaaaggtaggattgtagatgtatgttcttgatagcggtaaccttggatcttaaattcttagagaacattaaggataggaatggcagtgggtttcatcctgtctctcaattgagggattggtggaaatgtggtgttgggaacatatctgaagctgtctctgaatttagtgagaagaatgatcacttagcaatgcccgccttgaatataggaggagtaggagtatctcctgtgtcacatgtatgtcattcctcatctattcctgaggtttaatttttagtagaggaatatggagtaggtccatagatattaaaatgacactctcaggccatgcagtgactcacacctgtaatcccagcactttgggaggccgaggcagccagatcccttgagcccaggagttcaagaccagcctggacaaatagcgagaccttgtctctactagaaacacaatacaaaaaattagccaggcatagtggcacactcttgtagtccctgctactcaggaggttgaggtgggagaatcacctgatcccagggagtcgaggctgcagtgagccatgaacgcactgaggcactccagcctgggcaacaggagtgaaaccctgtccctcccctgccccccaaaaaaagacactctcaaatttctgtaactactctggcagttgaggtatgaatctagctatatcacctgattcctggtgcagttctcatctcaccacaccaaactgcttatttcacagcttcttgcacagcgtgcctacaaggtctagggcccagcacttcagcatcagggtttaaacataaacatacacatacatacattcaggctttcattgtggttttgttagtaaggcctttccctcacaacatctgaaacaaaattctaaaaaaacagtttcctaaaaaagcaaccctatggaactaggccatgccaggaaatgagttagcccaggaaccctactgcaaaaacatcagtcagagaggacctcacacctctccagactgagatggtgggctcacatagcagagcattatcatcagacattactgcatgtcctctaaatgtgatgattaatactttaaagcagcatttcctgaagcatgtttcatgaacactagctctacaggcagctccagaaagtaaactgttctgcagtcaaataaggtttgagaacccttcccactgtacccttcccttaggaactcatcatgcagaacaatgttaaagagtcttaaagagttctgcagcaaataaatgtgttaggttttctaatattttccaaacttgtttagccctctctttctctgtcatgaaatacatatattaatatccaaccaaagacattttaagaagtttgcattgaagtgttaagaaaatatacatctctattacatgttttagaggcattttctctgagaacaaagaagttaaaatacaagtggggcaagttgacttcatactccatgcttggcaaagtgccaacaacatactgtttgttcagtattttttattatattaaattaataaacaaatgagacacctatgaatgcatttggtattttgcccaatttccatagaccctgcctctatttttccctgatgtctctcttgatcaacttctctcccctacctcctcctaaaatgttaagcttctatctgaagccaaatccaagttactacaaattcttatcatcatgaaactagctcagaaattagagtggcagagatagctgggtttcttcacagcctggggcagatttcaatatgtgccacaggtccccctgccttctctccacagttaagtagggccacacagctttgttcaggcatgagtctcaggccctgcccagtgacaaatccagggtagtgcccatgtggcagtaattaacttaatacctggacttgttttccacggtggcccaatgactggcatccactccttctgccctattttcatatatatcactttttgttttactagtttctaaaagacttcctcttgaaaccaaagagtttgcaacattctactacagttaatgtaaaagttgaagctactgtctgggcatggtggctcacgcctgtaatcccagcactttgggaggctgaggtgggcagatcaccaggtcaagagattgagaccatgctggccagcatggtgaaacctcgtctctactaaaaatacaaaaattaactgggcatggtggcgcatgcctgtagtcccagctactcgggaggctgaggcaggggaatcacttgaacccgggaggcggaggttgagcggagatcacaccactgcactccagactggctacagagcaagactgtctcaaaaaaaaaaaaaaaaaaaaaaagttgaagatgcttacacaagggttgagagaaagcatggtggggtggacacccagagtttagggatcacattgttttacttgaaccatggctgtctgggccttgtctctaccttgcaataggttgagtactagaatgttctagactatcacagatgatatcaactccttttctactctagaagattcaagctactccacacaccacaaagctctccaattgcagactttttctcctatttctgttcctgataaataaacaggattggtaatcagaaaattaatctcaacagatcttcaattcactaccaaccacttgggttgaatgaatcattatggaaattaccctaagactgtcacaagataatttctttattagaagagctaaaaatccttctcttcctttttctcctttccattctaaaatttctgcttcccctgtctttaagtacattcagtgcctctttttatgaagtattgtgtcttttttttttttttttttttttttttgagagggagtctcgctctgtcacccaggctggagtgcagtggcacgatctcagctcactctaacctccgcctcccgagttcaagcaattctcctgcctcagcctcctgagtagctggacctacaggcactcgctaccacacctggctaatttttgtatttttagtggagatggggtttcaccatgttggtcaggatggtctcgagtgtcgtgtctcttttagagccacctcccactaatactctggcatcactcctactcacttgtcattaattatgttgatacaatgaagggatgacattgctggatccttcataaggtgaaagaactattagtgagtggagtcaaatcttaagtggtgaaatttcccatcacactatcatcactgtcagcatcattaaaatgatcaagtgattgatgtttattgcatgcctacattttacaagcacagggctgggcactctcaggaccttaaagaagtagcaagtcaacaatagatagaggacttcaagcgtttatcatgagctctgtgctaagtccccaatgttcattctctttttgaagctacataatagcccttctatgctggccccttgctcaacaggttagagggctcaggaaatgtaacccaaggtatattgttttcttgtgacaacatcaatgatttcagtgcttaaacttatcctcctagaggactttaaaaaaaaaatagcaaccaaaaccttcttttaaaatgtcttatttattcatctaaagtaaattcttccaaaatgattccaattagcaatttttactgatttccgtgcatttacttatttactcaaggaagattgaatgagtgcatatgattttttcagcactgggccctagggattcagcattaagctagatacatctccatccatcctaatgcatagagtccagtttataatagatgtgttactcaaggtaccattcattctgctgaaatccttgagtgcacaggatagatattctgtgtggcagtgtttattggccacactctgtggtgccttgtggtggagacattcctgccccagctcaaagaaagacagaaaataaattatcgtaagtagcatctttagatatacagcacatgtgacaaatccaagtggctcttcattgtgatagtaagagcagttctgcaatcccattatacacatcttatctgatctggcagttgtgctgggagctgagctgaatgttttttgtatttgtacagcaagacatcaggctttcaagaattaaccagtgggcgaccaaaggaagcaaattttggctccataaaggaagacctttcatataatcagaaatacccagacaccacttaatgggcatgaagaagaaatttaagcaacagatggggaagggagggggaatgaactcatttttaaggtttcttccaaccctgaaattctaattctatacctgattttaaatatggggtttttggttttgtgggttttttgtttgttcgtttttgtttgtttgtttttttctggctttgatagccagagactggatagtttttaattacctaggggatatgtttagtggttatggattatccatggttcacttgcaattccttgattttgcttaatcaaatgtgagatcatttttcttgattcaatgcaaatgcacaaacacaaacaaaacataatatgtacatattcatcatgtctttttctttttcttttttttttttttcttaagatggagttttgctctcgtcgcccaggctagagtgcagtggtgcaatctcaggtcacttcaaactccttcctgcagggtcaagcgattctcctgcctcagcctcccaagaagttgggattacagatgcctgccaccacacagggctaatttttgtatttttagtagagacagggtttcgccatgttggccaggctgctttttattttctatacttttatacttcgaagtcatggaaacttgctgaccctggagggatcagtcctctcaaggctagctaattcctggagacagtaaaagctcacctgcagagccaaacaaaccagtccagagcccctgcctttaaccatctttttttattcactttttacacactgggccattcccctgccctaatcaccaggtacagctagagacagttcttctgcctcagaggctactgaagttaaactgtcaatcctacacctgcctaccctgccttgtcacttcttgctcacagagaaaaggctctcgtgtacattttcccctctgtccttctgcctcctgacccatgctgctgcttccccctgtggctgtgcttcctgtttctaaggaactgtgagtataaacatcttctttcaggacagtcatttctgtgtctgcatgtcttaccatacctgattaaaacaaatcctgggtaaccttaaaacaatgtgactataggaaagtagacagtttggtagagaagaaacaactaacatggaaatttaaggattattttgtggatttaaatggcttttccttggccaccatggccagtaaaggaaagaagatgacatttcttgaacatctactacatgctattgtacttacatgccacaagcatcacaaggtagatacaatcaatatctttactttataggtgaggaacctgacacttgaggaagtttagtaacttgtctaagttcacacattttgctcctggcaatgctgaacacaaagccagtttttctgttccaggtttttatttgttgtattttgtttgctcccccaaccccatcatatcccagttacctctctctgtaccatatatgaatgtcaaagcgacttgccctaattctttttcaagaatagtaagcacagaatgggaagagatacctcttatcttttacccacagaaccaattggcttcttgagacaaaacattcactagacctcatggatgaaagaaagaagtttataaaggtaatatgggaatgggatatgggatataaggcactaaggctcaaactgtcactgtgccttcagatggagctggcctgtgactggtacagctgggtatttcttggtcttgtctcaggcaggaactcctcatctatgtataaggaaatgtctgtgttcagctgtccatattggcatgatcaaaggcttaattctctagactggctccctaggtcatcttatacactgtcatagttttaaataaaatatatgaatggatatctcaggcccagatgtctcccctgaacatcttttgaggcagctcaaactttacatgcctatagtgttcctgataactacctccctcccatgccgttcttctagatgctcaagcgaaaaccttagggtcataccaaatgcatcctttcctcacatttccatatccaacccaccaccaaatcctgttgtcttacctttaaaatagataccggatctcacggcttctcaccttccccactgttgccacttcatgccaagtcactattctctcttctcttggattattaggatactgtcttagctagtaccccttcacctcccctgtcctctttaaactagtctcaatgcagaagctagagtaatcgtgttaaaactcaagttagatgatacaattcctctgcttaaaaccttccgacaactccccatttcactcaaacttttcattgtaatctttaaagtctgactccctgcccacaaacactcctttattaccattctgatctcatataataccactctacccttcactctggcctctctgctgttcctttgaacatcctaggcatactcttgtgtcagggcctttgcctttgctgtcaactctgccagaatgctcttcctctaaatatccacatggctctttctcttatttccttcagatccgtacttaaatgtcttctcattgaagctttttcttgcaccctatctgtaacattaatatctccctctaacatttcctatttccatttgctgctttaatttttctccttagcacttattactgtctaacataatgtaaattctactgtatttctggttcactgtttgtttatcccggcataatgtaaagtaaatgacaacagtatttaaaatattaacaactgattcagtaaaggcatcatccaagcagagcaaatgcagggttagtcagaatggatgattgttgtaaacaaccaagataggtataccagtgtgaactgacgacatatcaggtccacatttatacctaatgagataaagctagacagtctgagaatgtgctgggaaaggactctcaaatagaagggccaatctgttaagggaattctcataacagtctagaattaaaaataataagccatctcagaaaaacctactgatggaatggaatagggtggggtgagggttgggggcaaggtatttcaaagttctcatatgaggtaaaaggcaaaagtcagggaaataagttttctgaaaaatcttacgttactgaaacagggaacacataaagcaccttgacacagcaaagagttggtactttaattataattataatactagaggaagatttgcctgactatgaaagcaggaaagaggtttggcgggcaactttgccaaaacagttgaggctcttctctcattcttcttactagtgagccagcctcctactgcagaggctgaaaatgccagatgctcactatcttggcctcccctgtagccacagcctgctcatgtaaccccattcccatcctggccaatggaattggagaagataattattggaaacatatgagttcttcccccataaaaagatatgtgcaggaatgaacatctttgccctctatcccttctttttcacattgtctttgtcatgtgaggatgtgatgtttgaagttgaagctcccatcttgccacccatcttgcaactgtgaggggtgtgatggttaattttatgtgtcaagttgactgggctacaaagtgcccagatatttggttaaatattatcctgaatgtgtccgtgaaggtatttctggatgagagtaacatttgaatctgtagactaagtaaagccaattgccttctccaatggggtcaggccttatgcaactcactgaaggcctgaatacaacaataaggctggataagggaaaatttactctctctgcctgtcttcaatctgggacaccggtcttctcctggctttggactaagacttggactggaatttataccgtgggctctcctttttctaaggcctttagactgggattggaagtataccatcagctgtcctgggtctccaactgccaactgcagatcttaggacttctcagcttccatagttgcacgggccaattcttaatagtaagtctttttgtgcatgtatgtgtattcatatacatacatatatatgtatatataattgcatgtatacatatatgtaaacaccctcattgagtgggagactgcacttttttctcttatgtatatggaacatttatgtaaattggcttaatcattagtcaataagtaaaatcaataaagttaaaaccagacacatcctctgaacaaaagccaacaaaaataaaaataaagaattaaaaagtgaccaaaaatcctgtttactttgaaatttaaaaacaaaattcctagagatccttgtattaaaggaaaaataaaaatagatatttcaaacaccttagaaagcaactgaaagaacacttcccaccaaaacctatgggaatgataattttattatttgggaaaagtatagccttaaatgcctttactactaaagaaggaagactaaaaatatagaaacttaatattcatcttaataaacaagaataataataaatcagaataaactagaggatgaattaataaagataaaggtgtacatcaacaaaatcgaagagaaacaaaaatattagaagtagtaagtaaatttaggaggtggttctttaataaaataaaacagaccaacagctagcagtctgattatagataaaagaacaatgacagattcaggaaggattaaaataatatcatatgtgtttcttttccaatgggaaataattttttagcaaaatataaatgactcaaagttatctaacaggcagtgggaaacttaaatagaccaactgtagaccagcctgtgaaggtgattagatctaccattgaaaagggcactaggaccagatgggttcacagctgagatttatctaacctttacaaaatagataattataatgtaacttcagctgctccaggccacacagaaagctagacagctcaccaattaatttcatggtacaagcataaatttaataccaaaacccaaaaaagtagaaaaatagaaaagtacacaccagcctcatttaagaatgtaaatgtgaaaattctaaataaaacattggcaaaagcatccagtggtgcacacaaaaatacactatgatcaaatagtttattccagtgatgcaaagagagttaaatatcaggaaattcatcaatgtaattaatcacatcaatacattaaaacagggaaacacatgatcatatttatagttgctaaaaacaatactgtaaaataggaagggctggaaaccatttaaagtaactataagcaaataaaatctaaatataataaataaaacaataaaagcacacggtgaaaccccgtctctactaaaaatacaaaaaattagccgggcgtggtagcgggcgcctgtagtcccagctactcgggaggctgaggcaggagaatggcgtgaacccgggaggcggagcttgcagtgagccgagatcgcgccactgcactccagcctgggcgacagagcgagactccgtctcaaaaaaaaaaaaaaaaaaaaaacaataaaagcattataatgaaaatcagtaattagacaaaaatttccattattgttatcctttaatattatttgaaaatttgtttgaatgcaatgtaagaaaaatttaaaaacttgcagatatattttttaaaatagctaaaatgacttttatttttactaactatatgattgcatatttataaagaaccaagacactcaaataaagtctatcagtattaataagaggatttggtaagatgcctgaaaacaaaataaaaaatatagaaatttattaaaaagtgattggtttttctctattttaataataagtactcagagaggaaactatctacttataacagtgataaaagactttttaaaatcttgcaactaaacttactttttagtgaaactttttattttgtgtcagttgtagattcacattcaattgtaagaaataataaagagacccccttgtaccctttattcagttttccccgatggtaacatcctacaaagctatagcataatatcataccaagatagtgacactgatacagaatatttccatccccacaaggatccctcatgttgcccttctatagtgacaaccacttctctctatgccttcacctacttctaaactgctggcatccattaatgtgttctctatttctatcattttgtcaattcaagaatgttatttaaattgactcatacagtatgtaagctcttcagattagcttttattactcaacataattctctgaagattcatccaggttgttgtgtgtatcagtaatttgttcctctttactgctgagtacaattccatgatatagatgtaccacagtttgtttaaacactcacttgttgaagaacatctgtttccagttctgggctactgcagatggggggtgttataaacatttgtctacagattttcttgtgatcacaaatcttaatttctttgggataaacgcccaagtgtgcaattgctgagtcgtatggtagttgcatgttaatttttaaagaaactgacaagctgttttgaagaatggctataccaatttacattcccattagcaaagcatgagtgattcagtttctccaaatctccaacagcatttgctgtatcactatttattatttcagccattctaacaggtatgtaatagtatctcgttgttgttttaattttaattttcataatagcctaatgatgtcaaacaccttttcatgtacttacttgctgtcttatgtcctctttgatgaaacgtctcttcatgtcttttgcacattggattgcttgtttattgttgagttttgagatttttaaatatattcaagacactagtactgttacatatgtggtctgtaaatatattctgataggctgtagtttgtcttttcctccttgtaaaagggtcttttgcagaccaaagctttacattttgagaaattttaatttatcaatttttgcctttgtggattatgctgcacgtgtcaagtctaagaactttttgcctaaccctaaagccccaaaatttcctcctatttttttctgaaagttttatagtttaatgctttacatttaagtctgtgattcattttgggttatttttcctaataatgtatgggacttaaatcaaggtttttctttgtctataaatgtccaactgcttcagtaccagttttggattgcttttgtacctttgtcaaaaatcaatttggtgtaattctgtgggtatatttctggtttctctgttgttctgttacattggtctatgggtatacccttctgccagttccacacagtcttgattactgttgctatatggtaattcttgagacagagcaaactaattctttccactttagtcttcttttacaaagttgttttggctattctacttcttttgttatttagaacaaccttgtctatatctaaaaaatatcttgctggtatttttatagaaattatgttaaacctgtttataaatttggtgagaactgacatctttattattttcagtcttttaatccacgaacatggcatgtgtctctatttacttagatcttccatttctttcattcacattatgtagttttcagcttcaagttctgtatatgttttcttagatttatgccttagtgtttcaggttttaaaaaatttatcatcaacagataataagtgtacatatttatggggtacaacgtgatgtttagattcacatatatagtgtgataatcaaaccatggtaattagcatgcccaccatcttaaacatttatcatttccctgtaattagaacattaaaatcactctctcttaggtattttgaaatatgcaatacattgttgtcaactctagtcattctaccgtacaataaaacagcagaacttatttattctatctgtaactttgtacttgctgaacaatctctctccaaggccttctctcccctcttctccccatcctctggtagctacaattctactctctacctccatgagaacaacttattagatttcacatatgagtgagataaggtggtatctgtctttctgtgccagacttatttcacataacatagtgttttccagttccatccatgttgtcacaaatgacagaaattcattctttttatggcttaatagtattccattgtgtatatatagcatattttctttatccattcatctgttgatggacatttaggtttattccatatcttggctactgtgaatagtatggcaatagagataggagtgcagatatctctttgatatactgattttattccctttggttatatgcccagcaataggattgtggggttatattgtagttctatttttaatttttaagaaacctctaaactatttcccataatggctgtattaacttacattctcaccagcagtgtataagggtttcctttcctccacatcctcacaaacactcattttctcttgattttttggtagtagccattctaacaggaatgagtagataacttattttagttttgatttgcatttccctgatgattagtgatgtagaatattttttcatatatctgttggccatttgtatgttttctcttgagaaatgtctatttaggtcttttgcctctgttttaaaatcatgttttttttttttttctcttgttgttgagttgtttgagttctttatacattttggatctaaaccccttatcagatgtatagtttgcaactattttctcccattctatggattgtctctttgttctgttgattgattattttgctgtgcagaagctttttagtttgatataatccatttgtctatctttgcttttgttgtctgtgcttttgaggttttattcaaaaattctttcctatactgatgcaatggagtttttccttgatttcctctagtagctttgtagtttcaggtcttacatttaagtctttagtccattttgagttgatttttgtatatgataagaactttttttgtttgttttttgttttttagcaactgtaagtgttggttttcactttagtattttaaaatttggtttccacttaaaaaaaaaatttgagacagggtctcactacgtttcccagactgatctcaaactcctgtgctcaagtgattctcctgccttagcctgccaagtagctgggattgcaggcatgtaccacatgcccagctggtttctacatgttaatcgttggtgtatagaaatgcaactgactttgctgaaactcacttactcattctagaatttttttggtagattctttggaattttctatatagacattcatttcatatgtaaataggaacagttttatttcttactttcctatttttatgcttattttcttttcttacactattgttctggctagatactctagcacaatattgaaaaagagtagtgacagcagataccctgctttgttgcctattttggaggaaagcactcagttttttaccattaagtataatattagttgtaagatctctgtagatgctctttatcaagctgaggaagttctcctctatcctgatttttctgggagtttttgtcatagatggatattaaattttctcaaatgcttttttggcatcaatatgatcatgtgattttcttttgtagcctgttaatattaatgtaatattaacaggattactatattatggtactatatggattactactatatatggtactatatgaattactatattatggcaatgtaatagattgattggttttcaaattttaaaccaatctttggtttttaaattttaaactagtcctatatccctggaataaaccccacttagtcatagtgtataattctttttatataatgctgaattctatttgctaatggtaagaatttttgcatctatatcgtgaggaatactggtcttttttttaataatttttttgtctggttttgatatcaggattataaaagctttataaaataaatttagaagtgttcctttcttttattttctagaagagattgtgtaaattgggattaattcttcttgaaacattgggtagaattctccagtgaaaccatctgggatgggagatctccttttaaataacaaattaaatttccttaattgttataggactagtcaaattatctacttcattttgggttaatttttgcagtttgtgtttttcataaagtgacattgtcaaatgccaaatgtcaaattttgataaatctgacattttgtctaaattgtcaaatttatgtgtgcaaaattgtttgtattattatcttattatccttttgatgtctgcaggatgtgtggcaatatccttggtttcattcctaattttgataacttgtgtcttctctctttttttatttcccagttgttacaggatttgccaattttattgattttttcaaacaattctttgcctcactgactttctctgttgtttttctatttttaattttgtttatttttgctcttatcttcattatttccttctttcttcttgcttttgatttactttgatgttatttttctaggttattgatttgaggtttttcctcttttctaatatgtgcattcatgtattagaagcgcactcagcacttctttaactgcatgccacagattttgatgttgtattttcattttcattcacttcaatgtatttttacatttcccttgagactgtttttggatcaggataatacaagcttcacccatggattatgcagaagtctgttgcttgtttttcaagtgaagatttttcctgttacgtttctgctcttgatttctagttcaattctattatggctacagaatccatccaatattatttcaattattttaaatttgtagatgtttgccttgaggcccaagatatagtctatcttaatattatgtcctgtgggcatttgcaaataatgtacatgttgctggtttggagtgaagtgctccataacttaataagattttgtttcttgataatgtttttgagttctatattcttgctgattttctgtctagttgttttatcaattgctgagagaggggtgtactgaagtctccagttttgattgtgaatttgtgtattacttctttcaattctttctgattttgtttattgtaatttgaaactgttgtttcatgtatacacatttaagattgttatgtcttcttaatggattcatacttttattattatataagatttctctcttttttggcaattttctttactctgaagtttaatgtatttgatattaatttaggcacgtctgctttcattagattaatatttgcatgatatatcctttttcatccttttacttttaacctacaatcttaatccattttctttgttgtaacagaatacctgagactgggtgatttctaatgaacagaaatttatttagttcacagttttggaggctaaaagtccaagagcatatctccagcatcaggtgagggccttcctgctgtgccatgacattgtgggaggcatcacatgctgagacagagcaactatactagcttaggtctctcttactcttcctacaaagccaccagtctcatcatggggcctcacctgagtgaccttatctaattctaattctctcccaaaagtcccatcttcaattagtatatgaatttggaaattaaatttctaacacctgacatttgcgggacacattcaaactatagcacctatctgtatttttatacttgaagtttctcatagagagcatataactgggtagtgtttattaatccaacttctcaatctttgtctttcaattggtatatttaagtcatttaaatctgttgtaattatcgatatggtagaatttaaggctaccattttattgtttttgtttgttttctgttttatttttcctgccatcctatgggttacttgaacatttttttaaatttcatttcgatttatgtagcgttttttagtgcatctcattgagtattatttttagtggttgctctaggtattacattgtatatacctaacttatgagtagcatcattttaccagatcaagtgacataatggaaactttactttccccaatgtccttttattatccctgtttataatagaattgtcttaaatattttctctacataaactgaagaaccacatcatacagtgttacaatttttgcctcaactgtcaaacataatgcagaattcaggaggagaaaaaatgcctattatttttctatatttttgtgtactgcctttccttccttttttgatgctccgatgttcttttatcatttcctttctatttaaagaactttgtctcaccattcttttagggtaggtttgctggtgacaatttttttttagttttctctcatttgagaatgttttgatttctctttcatccctgaaggatattttcactgggtataggattctgagttgatagttcttttcttttagaactggaaaaatattatgccccttccttctttcttctatgtcttttgatgagaaatctgctgtcattcaaattgtttttaccctataggcaaaatgtcatttttctttacctggttttagatttttttctttgtccttagttttcagaagattaattatgatgtatcttggcatggatttccttaggtttaccctgcttgaagtttcactcatcttgttgaagctgtaggtttacatcttgtcaaattttgtaagttttctgccattgttcttcaagtacttttttagttctgccttatttatcccttccttcttggactatgacaacacgaatattccatcttatagttccacaggtttctgaagtgttattcattgttttcaatctatttttttctcagttgatcagattaggtatttctattgttctatcttccaatgtactgattctttcctctatctcttccattctattgttgaacatatccatgagctttttaataccagttgttgtatactttatttctaaaatttaaatttggttcttttttatacttctatttctttgctgaggttttcattttattttcttttaagtgtattagtaattgctctttgaagcactttaattatggctgctttaaaatatttctcagataattttaacatctctgtcatcttagtgttggaatacattgtcttttctcatttggtttgagataatcctggcttttggtatgacaagttaaacctagacatttttttgtatgtattttgagactctggatcttatttaaatcttctgtttagctgttttttttttgtttttttgtttgtttgtttgttttttcgacactgcttttgtagggaaagcaggggaactgcctcattactacaggtgaagatagaagtccaaattctctacctggcctccattgacagccaaagcttgaggctccttattactgctgggcaggaatgggagtcctatttccctagctggtctcccctgccaccatagtagggatggcctcattactactgggcaatggttaaagtcctgactctgtactaggcctcctctaacacctccccagcgacgtgggggaaggatgccttgttactacctgttaggagtgaaagcccacatttaccatgtgatctttaatcccaatgcaagttggagagcttttaccagccagtgggggtgaaatctccagctccctacttagcattttctgacaccatcctggctagggtgttaggtcatcttattatagccttgagagggtagaagtctcccctgcccacctggtctttgctggcatgggcaggggtggagccacaatatttttctctggtgtttggctagagtaattattgtctagaaccttttttgtctagcttggctgtccctttcctggtcctttgggtagggagagtaggcttctgctggggcatttttgtcagcacactttaatgtttgctggttgttggcttcttcagctcttggtctgggatatataaggcagaaaaacaaacaaaaaatgaagagaaatcaccactatgtcattttctttgggtctcaaggtccctagccagtctgcatccttctttccaacttttaatgtattcttatgtttgttttacatttaatgttcaaggtttttgccatatttagtgagatgaatggggaaaagtacatgtattccatattctcagaaatggaagactactgctgcaattaattttaacatgaaagacacaacatttaactgaagaaatttgtataatcagttggaaggatgagatctatgcaaatcataccaagattttgaatggtaaaattttatgtcatgatatgacaatttctccaaaactagtatacgaatttagtgcaattgtaataagaatctcaatgggttttgggggaattgacaaaatgatcaccaaatttatatcaaagaagaaatacttgagtctacccaagaaaaatgtgaaaagaaaatgccggtgaggagaaatttctttttccagatattagaaaataataaaatataaaatataaattgtatataaaatataaaagctaatgttgctcaaataaatataggcttggtataggaataaacaaatagatccatgtaacaaaatagagagatcagaaaaggttgctagtatttaagagtatttattcatgagaaaagtccatctcagaggaaagaaataaattatgtaataagtcctcaactgcctaataacctaagaaaaaagtaaaattttgcttcattttactccatactgaaattaaaaagcatgtctagagaccgtaaattctcaaatataatgaaaaagtaaaacaataaaaaaaattcaagaaaatctttgtaactacacatgtatatgttagggaaaaaggaatcattcttaactaagtctagaaacatagaagtttttaaaagtaaacatatttggctacataaaacaataaaacatctgtgtgaccaaaaatctcataatgaaagtcgacagacaaatgatacatgtagaagaaatttaggtacaagacaattcaaatgacaaaaagttaatgccaataatgtataataaaatgttgaaaattgttaagagaaagatgaacgatatagcagaaaactgggtaaagaacataaacagataattcacagaaataaaaaatccaaatagccaacatatttcagaatgctcaaagtcagtaatgttcaagaaattgcaaattgaaataacaatacatatagcttgacttccatcagactggttaaaatttttttaaaagataaaatctattctgcttgagatatagcaccaaagattactcatacattaatggtgggaatgtggatattacagactttggggcaaactattagcaacatctactttaaatttttttttaaatgttaactacgtcctccaacccagcaattctgtacttcagaatataccccttagaaataaaaccaccaccatgtaaaaaatatgaagagatatatgaactataccactgtttttagtgccaaataaactggaaacatgatgaatgcccatcaacaagagcataggcaggagaataatgggtggtttattatgccatgggagattatgcagccatttgaaagagtgaatatcagttgacttgcagagattttcataaggtattttttttatggaaaaaagcaaggtataagaaatgataggcactgtgtttccatcatataaatcaatgaccagtgtccatattattttgtgtgtcaatatctatataagattacatgggcaaagagaaaaaccaaaaaggttatattccaagttatttacatttgaataggaatatatattgaaagagagagaaaaaagagggtggaaccaaacaaagaagtataagaaaaaaaagagattgctcttttaaaaggtgatgacaagatcacaattatatatttatgtaaaatggtgtgtgtgtgtgtgactaccatgtattcgaaaaacatttaaaagttaaaaatataccttaagtcacataccaaatatagatatactatctctcaataagtccaaaacaactaacttttccccctgtgttggaatagattctgattctttgtatgtatgtggataagttgaattaggtgatatacatttagggaccatgttgtattaaaaatgtgtaacactgaacctgagaatagcttccaacagcaaaagagtatagttgaagttgtataaatcaggtgctcctgtgccacgaagctatgggtcatggctccaaactgggtaaaccaaggcacccctgggcaccacagtgaactcagggataacatcagatgttttcaagagaaacacagaggtattttgtatttgatgaataccctgttaaatactatctttaagtaatttatgttttcaatgttaagttactctactatattcttttcaatgtcatgatgtctctgtgaaactagagttttggcagtttgcttaaatatggaacaggaaatgagggtggtggggtccgatatgatttcaagatatgataaattgtgtatgtcgaaaagttgaacacattcctatattatactattataaatacataaatatgattattaaagagtaaaatttaaattatttttccttaaatttatatgcattactttttcaaatgacttgctcagttgctgggacctaactacctaataaatggaataggtaatttttttttttttttgctagatacattgtgagaaaataactgagccactaagggagctgtgagtacataatctgctatagaatggtataaactaagctattggctgaataagaaaaggcagcccaaacctccataggggaggagacagtggttgcaactactatgaaaacagccatacggacctgtgacagatgactattgctgaactacaataaactccttcctcctcagatgttaaaaaaattaaatttgaaaactgctaccactgactttacttgtatttacaccaagaaactaattgatattttatccactgcctctattataacctgcagggatgaaagaatacaaaacaattacaaatcaattactgttacactgggttttcagaaaccataaatctgacagctgctttgctgggagtcacagtgagtttgacaggtttcttaatattcagaagccaggcatcagatctagtcagaattcacacattctaatgttgattacttcctttgtgtgttttgtaatgggatttgttgaatacaaaggccacttgtctacattattattgtaaaataaatcatattaggattcacctatcccatcacattagacatttttattctggaaactctcagggttgctagtattttgaagcattttccagatgcactctgcaacaatttcaaactgcaaacctttcctggcatatccaagagaaatttttgactgtgttcttccataaagtttctatttccttctgagagaatgccaataaaattatttaatttctcctgatccatttattatcatccaccaagaatgtatccaagggcagtgcacatcatgccaagtgttaagctagggtttagtcagtgtctataaagaaacagcgagtaaaaaatgacaaaaagctttggtgtttaaaacacttttacatttctcttgccaaactcaagaagtcttaatagtcttggtaattaggcccctaaatcttgatgagtgctaaagtgttagtgacctcataaaattaacagctagatacttcacctgttcagctcccccttatcagatgctgagaaaagactaggtctttctcaagagcatttgttattgttagctcagacttccaattttaccatatgaattctaaagtttcagggtctactatacccatataggagtctgcctggatagatatctcactatctagagcctgaatctgaaaataccattatagggcagagcttctcttactttgaaaccaccccagtcattccaaagtgccttcacctagaaaggtacattgcattatcattcatccatgctctaccttgggatgggaaaaatgaatggcagaagatagatggtctgccacagtggccagctttggccaggagatggcaagagaggatcaccccagtggagacagccaacacctaaggggctccagttggcactgggccattagtgacagttctcaggaatttagcaattcaaaagcaaaggcttgagttggaggcccggggttggtagttgaagtatgctgatatgctttggctgcacctcgcccaaatctcaacttggattgtatctcccagaattcccacgtgtgatggaagggacccaggggaagataattgaatcatgagggctggtatttcccatgctgttctcgtgatagtgaataagtctcaagagatctgatgggtttatcagggatttctgcttttgcttcttcctcattttctcttgccactgccatggaagaagtgccttttgcctcctgccatgatcctgaggcctccccagccatgtggaactgtaagtccaattaaacctctttttcttcccagtctcagatatatctttatcagcagcatgacaatggactaatacagtaaattggtaccagtaaagtaagggggttgctgaaaagatacctgaaaatgtggaagcaactttggaactgggtaacaggcagagactggaacagtttgaagggctgagaagaagacaggaaaatgtgggaaagtttggaacttcctagagacttgttgaatggctttgcccaaaatgctgatagcgatatagacaataaaatccaggctgaggtggtctcagatggagatgaggaacttgttgggaactggaacaaacgtgacttttgttatgttttagcaaagagactggtggcattttgcccctgccatagagatttgtggaactttgaacttgagagagatgatttaggtatctgtaagaagaaatttctaagcagcaaagcactcaagatgtgacgtgggtgctgttaaaggcattcagttttataagggaagcacagcataaaagttcagaaaatttgcagcttgacagtgcaatagaaaagaaaatcccattttctgagaagaaattcaagccggctgcagaaatttgcataagtagcaaggaacctaatgttaatccccaacaccctggggaaaatgtctccaggccatgttagagaccctcagggcagcccctcccatctcaggcccagaggcccaggaggaaaaagtggtttcatgggctgagcccagggtccctgtgctgtgtgcagcctagggaattggtgccctgtgtcccaaccactctagccatggctgaaaggggacaacatacagcttgggctgtggcttcagagggtggaagccccaagccttggcagcttccacgtggtgttgagcctacagttgcacagaagtcaagaactgaggtttgggaacctctgcctagatttcagaagatgtatggaaatgcctggattcccaggcaaaagtttgctgcaggggcagggccctcatggagaacctctgctagggcagtatggaagggaaacttggggacacacagagtccctactggggcaccacctagtgcagcattgagaagaggaccactgtcctccggaccccagaatggtagatctaccaacagcttgcaccatctgtctggaaaagctgcagacactcaatgccagcccatgaaagcagccaggagggaagctataccctgcaaagccacaggggaagagctgtccaagaccatgggaacccacctcttgcatcaacatgacctggatgtgagacctggagtcaaaggacatcattgtggagctttaaaaattgactgccctactggtttttagacttgcatggaccctgtaacgtcttgttttggccaatttctcccatttggaatggctggatttactcaatacctgtacctccattgtatctaggaagtaactagcttgcttttgattttacaggctcataggcggaagggacttgctttgtctcagatgagactttggactgtggatttttgggttaatgctgaaatgagttaagattttgggagactgttgggaaggcatgattaattttgaaaagtgaggacatgagatttggaggggctggggcagattgatgtggtttggctatgtcctcacccaaatctaaacttgaattgaatctcccagaattcccacgtattgtgggagggacccagggggaggcaattgaatcacgggggctggtctttcccatgctattctcgtgatagtgaataagtatcaagagatctgattggctcatctggggtttccgcttttgcttattcctcattttctcttgctgctgccatgtaagaagtgccttttgcctcccaccatgattctgaggcctccccaggcatatgaaactgtaagtccaattgaacctctttttcttccccgtgtcaggtatgtatttatcagcagagtgaaaacatactaatacacgtgcctaactcaaagagagagtcaaacaggttaggataccaatgggaatcttgcccagccctagtaggatgatggggatgccagaaagtagaagaatccaagcaagaaggatggaacaaatcaggaatcatgccttacacaggtcattgggcaacaaggaatgaacgagatggatgctgaaaagccactgaggttggcaggatctaggggtaaccagttggttttggaactctaggatgaagccaccattcatgtatcagggtaggtttgatatcctacaactctctgccagtgtgaaccctcatcagaatcctcatcagcctactttaggaagcttgtcactacaagccaagaaatttgagttcttgccatcttctattcttttatttactgtgaccaagccaagattagcaagttcttctctctccccaaagctcaactctagtttataaagtggagttcctaatactcatctaatggtagcatcaactgtccttcccctgccactcaagcaaacaaatggacatggagcccttaggccaagcaagaaagaagttggatcagatcccaacgaagtcatcttacaagaaaaaaaagtgtagtggggggtgaaaattatggaactgcaatcaagtactgatgttgtacttaccaggctttgtcaaccactttatgattgttaagataattaatagaaaattgcataatggcttaaagaaagtttataggttctttaaaacctatctgcagagaagttctttaaagcagtaattagcataatgagaaatgagaaaatttcagcactattcctcccacaaatgtgaataaatctattaggcacctcactagctattctaaagacagaactctaatgtaccttaagtgctgtggagggcagaaggtcatcaatattacaaagttatctggcatccgttttataggatcagctccaggtagctttgccacttctgaaatagtacttcctccactataaagaaaattctttgccattgtgacctactgtgatactcacttatgtaaaaatcttagtaacaactttgtttgtcagagtacaaatagtgtggattttttaaaaaagaatcaattccatcattactggaatgccatcatagctgtaatttaagaacaaatttattgaagtgaaatgcagtgctgtaaggactgcctaagttatatctgtaggagtttgtctgaattatgagaggaaagaagactggcatttcttgagactttatatgattatgtaacttaatcctcacagcatctctgtgaagtgggcatccttgctactatttgatagatgaagaaaaagaggctcagggaggatttttaactggcctcagtaggcataactattgaattgcagatttggtatttgaatctgacctcttccttaaagtaattttttggaggaaaaaaaaactatttccagtttcctggttactaatcaaactcaggttcccatgtaacgtgtgtctatgctttactttaggaggtcatctcagctccaaatgtagcagaaagcctagacttttccccatttttttctcccaaagagagagtcacccttatggtacagggtacacacccatttgcattttcattagatgagataaatcattttgctattgaggatgatttgcccagcaaagctttggaagctctcatttgcactccatgagtaaccagatacttcattccccaaaacacttaaatacgtgacactttttctttttaaaagggcaatttggaaacaaactaatgtcagcccttcttcacaaaatgagatgaccagttctatcctttctcatatcttgggtggtaattgggtcaaagggatggcaaatgagatgggggatatgagctcggtcaaagcaagagaagaagattcaaggagatgatttaattttcttagcggctggataaagaattccctgagggaagagacacactttccttgttgagaagatgcctagataaattcatcttagagtagaatcttagccttcagggcctgaatgaggatagaattgtttagcttgagacttggggtaagatttgctttttcccctcaagagggaggagacagtaaggtagaggaagacagtggaagagggtaagagggtaagtgatgaaataagaaaaggcttcttccacctcacttcgtacttttttttttttttttttttttagagaaagggtctggctctgtcccctgagcttgagtatagtggcataatcatagctcactgtagcctagaattcctgagctcaggtcatcttcccacctaagcctgcttagtagctgagactacagccatgagctatgagctaccatgcctaacactatcctcattcttaatcagattaccaaagtcacaaaacacttgagaaaaatggaatttttaaaatgaaaatttatgaaaaggctgggcatgttgtctggaatgacaaatgggtagtacgggacaaaaaggaagttgcagaggtagaaacccacaaaaagtatggttctgggagcttttatcaattggcagaggttggggatggctctcgactcctccagatcattacatggtttaggtcaagcttaaccagatgcccaaggcaactaacacctgcacttagtaactttacaattctgtgctattgctgtttctcagttcatttgcttctcttgggaccctagaacttttaccattcaacagtgatgtcttgggttaactctcaataacagtgtgaagaaaaaagaaaaaacagatgtggaaatagaagcaggtaggatatcagggcatttctcaaaaatcataattatctggctgagaagagataaaaccctgcattagcattgctttaatgctcaaatgaacaatcaggaggcctttttgagaggaggtaaatggctgtattactatttatagtcaatcaattagggagcaaatgataacactcaaatgaggtttccctgcttgggaaatataaatagtgacccaccatgatgcttattttattaaggatctttctaacaactttgatgcttacttcaaaaggaaacacatttttaagatacatgactcctgccccttccatcaaatcctcattctctctgtggttaagttcacttatcctaagtaaggaagccttagttggctagaagttgacaacttctctctctctgtatgtcagaatattaaggggcacccaggaagacagtgtctaaatctattatatgacatgtctgaaatctacttaagatcacctcgtggtcactcaaattaatagctactatttgccaagttgtatattaaatgtttgatataccagacttcatccaatcctcacaaaagccctagaatgcaggtagttttattcccattttgtggatgaagaaactgagggtcatagtgattaacttaccaagtgttattcatttgcttgttcatccattgattctctcaatatctatttatggagtgcctactgtataccgcatatcattctcattgctgaagatagaacagtgaatgtgagagaaaaaaaacgtagattcatggaatttatatctgactgagctgaaaaagggtaaccagaataggagagagctgacatctgagcaatattaagtaagaattctataactgccccttgaaatagaaaggtttgctatgtaaaatttcactgctttctgcaggaagcctggatagcaacataaaagaatatcattacttttacagatatcatcattattttatagatagcatcattattttacggatatcatgatatttttatgaatatcatgagtgtcagcaaaggtttattatggttttttttccaatattgcaattaaagcttatacatgctacgacagaaaaaaaaaagccacatacacaaaagtaactagaccaaccccactgagattcccatggggaaggagataaggcaggaaagaatacatataccacaaaataatttcttttaggaaaacaaaaaaacaatcttttctatacaggatatgaccatctaggataccttccagatatagtaatttatatttcccccaagaagttctgagttgatgcaggtgtctttaattatgataaagcagcaagcattttatcctcttgcacaatgagcttttccttttcaaatcggacaagtaataaagtcttatgatgaatgtgatttagcaactgacttaataactgagataacatgaatcacagctgccacattcaagtagtcttcgtttgatgcagctgatctgcagtgtacccttcatgagtgtgcattatgataaacctgtctactgctattgtgtacttataataacttaggttattcttcctccaaatcttccatgtgtttctggagacgtcgcagtgtaatttagctcaagttaatgatagtcctcaatgcaatattaccagttatcatttttcactttaacatagcacataagtggctaatgttccctggcatagatgaagtcctaggctagctaatgaggagattatgatggacagaacaaagaggtcacaggaaattgtgcttctggctctctaatcagatcaggtttacctcccagatttcacctgtctcaggaaggcaaaggactgaaaggaaattggttgctaacatcaaggaataaatagtattctcctacactgtgtaggggatatattttttggaggaaaattcaacaatatataacaaaagccttaacactgtgtatgttctttgatcaagcaacttaatacttagaaatttattttaagaaatgtctaaagcagaattttctgtaatataaggaaaataaaacagaaatatccaataatatgactttgattaaataattatggtgcatccaatattgtttttagcaaacacttacagggtgcatcctatgtgccagggtctctaagcatttaaaattttaatttaatcctcataacaaccctatgaggcaatacttttatgattcctatttcactggtgagtgaactgagccacaaggatttaataacttgcccaaagtcccatggctgctaaatgtctgaccaggcatttgaacccagcaattggactccaaactcagtgttctcaaactctatttatgttatctcacaacaatggaatatttttgtggaaaaatgctcaaaatatgcaggtgggtgagtgagcaaaaaaaagcaggttataaaataggatgaacagtgtgaccctgttttataggaaaaaaaaaagagaatatagccataaaaagaaaccttaaaggtctatcaagatatttcaaactaataacagtagttattttggggtgacatctttacctgcttctgaaattttctttttgcttatctcttagttctaattattgttatgaagaaattatattcaaatgttaagccccttagaaatgaaacaattggaagtctgaatatgaaaaataatattataactaaattgtaacatatataacataaaatctattgctagctatactgtggtgaaaattgtacattcccacattcctgctagcagtatacattgttacactcctctatagaaagtaatgtggcagtgtaaattaagaactatgaaaatgttcacttcctgttaccccatggtcctgcttctggaaattaccctatgatcacaactcaaaagaagaagactgctttgtccatttagcaagaaatatatgactgaaatatttaatttgtgtatttactggtagaaccctaagagtctggacaggctaccagggtttctatttctacatcttcccaacaggcttatgaggaaaaacagtgactagacacattgaagagctctgagattgtttaacaaagacctcctgtcaatgacctgggtgtcactccatccagaaaaggccctcagaaaagtgtagaatagatctaaatccaggataccagtggattttaggaggcagcaactcctaaaggaggtgtatgatgccttgtgttgtcactggtattatcttcccttcaaggagacttggttcaagcttctagcatgagggcctgtgaatagtggaaagagtaaaccacataaaagaatcgtgacattaggattgttatgagaagcaaagggatcaaggcttccttcctgtttgggaactcataagcattagtggaaaaactctcttcttcctgggaactgaaaatatcatgcttccctctctgtgataagcaatgctggaaccaagcatttctttctgtgctaaacttactgggaacaaccagaagtaatttagttaattaatctaagaaatactatatttgtatttggaagatgagaccatgagacaacctaacagcttatttatgaagactaatggcgttgcttatcaagaattgctttaggccactcaccttactgtgcccaccagtcaaaagctgttacatcataaattcttcccagtcccaaccagttctctgtcttgtaaaacctgccttaaattacctagcccagaccctaaaaccctttaaagattctcccttcacttcccccatcttagacactatgaggactctgtcaaggtcctttactatagtctaatcatctttgcttgatcaataggttttctggtggtctttgagagaggcagtagttaacttctctcagattaaggaacaaaaaatgaatttgaaagacagaaatctatgtgttgatggaagtgacatcgctgaagctgaggcaaatctagaaccctgtgaaggatcgctacatcaccaagaaggctgcaaggaaaaacttatgatgaaggagggctgaagacatatgaggaaggggaagcttcaacttactgactattgggaccaaatggtgcaagaaagacaatggacatcctaagtggatctggcactagcagctttatactgtcaagtatcagggtgaccaggcagaatataagaattctactgggctatgacagggaaggtgggccttgaaattgataggttggggaatcagaaggtccatttgttggtgctcagagctagagtcctgggaatgtttctgactgcactgtggttcaagggataacctccggcaccagattgcctgcatttcagactctggcctgccactcattagctgtgtggctttggccaagctacttgagttttgtccaatactctaagcctcagttttctcatctgtaaaatgaaattacaaataataatacctagtttgtagggttgttttgaagattaagcaaagtgttttacaagtactcaagaagtgttagcttttgtttattacttctttataattatccccgtggtggaattcttccaggtaccagaagggaaaaacactgagaggcttagtcaaagatgtcattatggtattatttataacagaaatagatagtgtggtgctggtaagtttgtagcatttgccaattttcaaggtgtaaatacctgtatcatagccaatttccggctaccaatttgaagtcactgaactcagaatagggaagagatgggcacaattggctcccaaaagctggtaccagccagctcaagcacagcactaggaagaggattaaatatttgccaaagtagaatgtccaatatgatgtctcttgataacacaatttgatgttataaaaattagaattctaaaaactggatacagccgtacaaaatgctcgttatattagaaaaaaaacagataaaaatcatatatgtaatgaaatcgcaagtcacatgctccctcagttctaagatgcacagttttcacagttttgttcatctgttcataatacattttacaatcatatttagtgtttcattttttcatcctgaacatctgctaataaatcagtgatgctcatcacaagcaatgctgctgtaaactcaaagataaatggcaaataacatgttgctaacattgggatggagacaggaaaggaatagaaaaaacgaaaacagttagatttgttgttgaagcagggttttaagtaatttttttctccttatgtggatgcctgttaatgttgtatccacaataaatcataacagaaacgttgaaatctaaacgtaggcattaatatatgtgtgcaaggaagggaaaaagtctctttctctctctctctttgactttgatttttttgcctgtaacttacctatgacactctaattaagggatagtaaaggcacacagtgtggaaggtgctaagtgtgagcgtgtgtgtgtgtgtgtgtgtgtactgtatttagatatttaggaaaagatctttcatcacttggtttgccctctatctaggagggacaaaccatattgagacatctatttagaggtggccctttacagaaaactgaagaaaaccagttcagattgattacaaaacatgcaggactcaataaagaagggcaggacctgcctgaacactgtgagtggcatcttttcatattaatagcccagttggctcccttcggcctgactagggcacagttgagaggctggggaaataatgaccccttttccctttgggcaaggagaggacactgttcatgcttcatcatacctgaaaggaaaaaaagccccagccacaattttttcctctgctgcttcagtgaatatttcttcaaaacaatagcttcagacccaatctgcttaccataaggataactttgagccagaaagatttcttttcagttccccaaatccctgctaccccaaacattcacactcagattatatatttatttatttatttatttatttattttttaggaaaaacacattttgagtgtttgcatccataaagccaagtacccttaccacacagagcctacaccctggtattctatttggaaaccaagtatccaatttctggactgtctgggtcttaggcttttctgatgttttgccacttcatttttccactcaagtctagttaagagtaacatagagattataaaaagtagctcaatgcagccactgactagtatatctggaatccaaatacctagtggaagaggaggctgagatttaggattgtaatcaggcttagacagtttttcacatatcagaagtgtcaatgctctcttgttcccaccatttctgcagaaaaccaagagctggttttcgggaacatttgcacccactcattctagagctggtcgtgacttctgacagcttgtataggtcactaaggcagcccagaaagctgtcagagcccaggaatttcaatttcttttgttgcatggagaagtggaaatgaaaacagaccactcgacaagctaaactgcatacagcagagacttgaaaaaatattctatcggcaatgtaatatcctgagcccagaatgaatctatccattgggacagaaattgaatcagaatcctcctttgtgtaaatgcccttcatgttgatcttttctttccatccagtgctgttttggtatcagatagaatctttcaattttaagaaagtgtagtacttaaaggactttgaactggctgagattttggctaacactatgcaaaaactgctttaatcagaagagtcctgggggatgtctgctaaacagcttcatctcaagcaggatgggaatggctccctctgatcagctgttgaaagattttgaaaaaattgaatttatttccttctgctgtcatggatgattttgccttgtttttttatcctctgcaccacaaactcaatgccacacttccctgccatgcaaccagattggacatgaatactgaatgagtcccctggaaagaaactcaagccccaaactaggccatgattccagagaaaggctacctccaactctcttaaagtgatttgcttactgaaggaaaattctaagttctttgcatcttatatatgctagaaaaagatgttttaaatatttaataggcctgagaactaggcagagccaattgtaattatattataatccacatctggcacgaggatgtgaagttacaacaaatgtctgcaagccttgacctcattccagcttgggttcatccattcgtgctgtcagaaaaacctatattttattgcccatgcagttttcccttgcttatggattccctagtgttaggtgagataacttatttatttcactgttcctctccttgaatacacttcattcatcagagggcaagctcagggatggggttgggaagctctaaaatcaatttgctatacaagtgaaattaagaaatactactggtggttgtttctctcaaggttctgggaagatgtgaagaaaactcaagtgcccggttcccttcctctgaaaaactatgagacatggccatctgtaaatgaaggtgtatgtttgagtgaagatttaactgtattaaacctaacagctacttttgcagacaagatggctaccagctgattggtctgtgctgaaaaggaaagattcaagcattttcttataagttagaaaggagcttagatgtgagttatgtccagaaaaaaatgattacctgacacttcaagccgcagtgatgataacctgtataggaggcgaggataaaatgctaccttcaacaagtggtgatggaacaactaaaaggacaagcaatactgtgtgtatgttcagaaaacctctttcttcattcctatttgcttactttctcctgcctatccttcctggaagaacagttttgctggtcttaaaatttacattgcaactgttagtggaaggaaagagcttcttccctcctttattttgggttgaactatgagtgattttttgtctatcccacctttgaaatagcccgctataagtcaaataataggagctgtattatgagaagaacataacttattttctcttatctacatttttttggctaatgggataaaattaaagcttcaatttattctcagaattaaactactcttgttctgggccccaaaacactcaagatgagtttgcacagttcttgatgcattcacttcagtaaaaaagcaagaacctcaaccttgaaacgacctcaagttctgtcatttccatatataggagtttttgtgtgtctgtgtgtcttttgtttgttttcacagcacaaaatgtattctgcacactcactcacccaacatgtcttcacaagcaattgttgactttctatttttgcgttagtgtattgcaaatgtgaaaggattttgaagggagcttttcctgttgtcctggaatttactccacattttaaagaaaagaataaatcaggagacagacaccccttctgagaagacaaccaacaataaccatcactgccttcaataaaagcttaaggttagagaggagggaaggaaggccaagaaatactgaagttgtacttcctgtctaattgcgggtatagtgacttccctttctccccgcaaagcggggtagaacttcatcactccacaaattcagtgaggcagacgagctgcaggggagctctcatcagagataggtggagctagcaaccaggggagacaaggtggagccagcaacaagagggccaagacctagaggaagctccaggaggccagggtgttatgggggcactcttctagaggccagagtgaaggtctgggatagcttaaggagggctgggatccttcactcagtgcttataaccacctgcttgtctgtaagcctgcaaaggcaatttctaaagttgatattctgagatttctgccacctaaggtccagtttatactgtggttttgccaccaaaaattctcatctttggaaacctccctgacttacctatctcactgggttaaatgtcatgacttggatccctgaatctaaacttctaaagacttcacatcactcaaaagctatgtgctagagttgtgtgcctgaaaaatatggagacattacatatcttttcaaaagttggatatttcattttattgatcaagccagaagacatgaaaatttgtttataaaagtcatggctaaaagcagtgtctgatgaccatgatagtccttatcttgattatagtttcatatttatatatgcctatttgttaaagtttctctctcaccaagtttaagctccatgaaagtaagaagcacgtctgacttctttaatgctatatcctcagtatctggtgaagagactgaaacataatagatgctcgatcaatagatgttgaagaaacaataaaaaatctttaaaattttattttgtttctatttgttttagatggagtctcgctttgtcacccatacagcattttgttttgttctgttttgttttgtcactgttatagttggtatgtttgaccctccaaacctcatgttgaaactcgatccgaatgttgagggtgggacctaatgtgaggtgttttggtcatggggtcagatccctcatggatagattaatgcccattttgggtgaagggtgaggggtgagtaatagagttgctactctgtaacttcccataagagctgattgttaaaaggcctggcacctcccctctcccctcttgcttcttctctcgccatatgatttgcacacacccagtcccctttgtcttccaccataaatggaagcagcctgagacctcaccagaagcagatactggtgccattcttcttgtgcaacctgtagaaccatgaaccaaataaacctgttttctttgtaagttacccagcctcaggtattcctttatagcaacacacaaacagattaagacagccagtgacaaggaaatttggatgcagaatccacattgatttttcaaaatccccattctgattaggttgatactatctgaaaatggcttcatgtgctcctggttccatgtcagactcctgctacacagttagaggttggagctgggtttttaattttttttgtttgtttgtttgagcacacacacatttccagatacagtcatttttgcccatacatttacactgagttcaattaattttaagagagttatggctcttttctgagccatcacagcactcagtatccattcgcaaatgaacaggcaatgaacggagtgaggctacagtgaagttcgtggagggagatgtcccaggaggtttaacagttttatcattcctcaaagcaggagttgggctgttataggtggcagcatcacaaggcttggctgcaccatcttcagtgccactgagaggaaggaatgacaaagaagagaaggctacttagcccatacctacaccatgccaagaaagtgcctagcatatagcagatgttgaaaaaaatccatgttaaatgaataaacagattcaataaattttattataaccattaattggtattagtaaggaactacagagtgagatctcaagagtgttgccacagtaaatgtgatgatagaaaacctctgtcagacagtgtgtacagaatgtgtgagctatgaggcagcatctccacattagtcacatgcaagggagtttcacttagggattcttgatagtatcagaatccctatatgcatctcctcgagctgacttatcagagagccagaagtgtaagaagccataatttcctctgaagcataaattactgatgtgaagtcacctgtgtttctactcagatttgtgaaatacagatggcctggtaacgctccgtcaattggaaaaaatgagtgcagtggggtgagatgtttatctaccccagatctcacagcatgtcatttaatattagcacatttcttccatttgtgtttctgttggtgttttgccccttctgagagcttatgatttatagactacatcatgaatgtgcctggggaaagcctggacatagagctgcccagtgagccctgtttactgaagtgcccctgggctgatgtgcttgctgcctgtatacagcattaacagacacccatgggagacagtgtttctttaagaactaggaagtgatcacgaatccaaaaatctatttaaacctttttagaatgtattgactcttttggactgaactaacacttgggtagatgacaaagggatagaattagttaagcactttactgggtatctagtacatattaggcaatacagaatgtcataaaatccagcataggcaaaacaccgttgactctcaatttggaatctcgtagcctgccaaatgaggtagtataataaagaaaaactagccacggtttgttaggccagcattttcatatttgtagagaggaatataagggatttaaggaaagatttagctgccatcagcaaggacatacctgttttattttaataaatgtacaaattaatgtttgtttttaaaatgataaaacaatatgtgattattaatgaagttttatttattatttatttatttgagatagagttttgctctgtcacccaggctggaatgcagtggtgtgatctcagctcacttcacactctgcctcctgggttcaagcgattctcctgcctcagcctcccaagtagttgggaccacaggtgtgtgccaccatgcccggctaatttttgtatttttagtacagacaggcttttgccatgttggtcaggctggtctcgaactcctgatctcaagagatccgcctgccttggtctcccagagtgctgggattacaagcgtgagccactgctcctggccaaggaagatttaaataagacttaaatgaaaaaaaaaatcacctgtgatctaattatgcacatatagccactatagaattttgatatcttttgtatcatctattttttaaaaatcccctatccaaagcatcttgtttgggtcttgatttttaataactgtgaaatctcgcatcctgtttttctacatcatgtgctactgtaaacattttaacctgttaagaaaactctttacaaatattttaaatggttacttaatactgtattaagtttcttaaccaaacttacttaaccatttcctattgctggacattttcagtgccatccaaatgtctgctcttttaagatagcagggtgatacatatctttgtgcctaatgttttaaaacatatattttgagactatttcattaaggaaactgaggcttaggattattagacacttgattgcctgttcaatagtcattactcacttcttccttgctaacagaactccagcttcttccagcaggcagggtcctcatagaagctggggacctacccagagatgaaccatgattagttaaaaccccaaatggccttttgtcagtgactgatttagagatgaggctctatctagttccagccaaaaatacagcaggggaagcctgctgagggaattctgcaatatattttctacgctgaaaaaaacggtaagaaaaaaaaaaaaggacctctttcttgtagacacaggagagtgaggacataatgtcttgtgcagtggccaccatcttactataaggttagaccagcctgaatgtgaaaaccaacatgctttaaatgaaggagcaaaagtatgaaagaacctgggttcacagtaatattcataattttatcaataaatagttgcataatctgttacttgcaatcaaaagcattctaactggcagaataacagagaggaaatttaaacccaggcctgactgatcatgaagctcacaaaattaccaagacaatgcaatatgatgtcccttgcagtccttctctttggtgcttcagggtcttctaccaagaactagaggaaagctaagctggggagaccctttgctgcctttcacttccctgcctctcgtccactatctctgctgcaatacacagaagttctaaactagatattgttcttaaaatgcttctcctgattacaactaatctaaaattatagcaccacactatgtagcctctttgaaaattgtcttttttcaagccaactgttaaacagcagtttcttttacttgtgagggcctctcttaaaatcttggcctaacatttgcctcaattattttggctgataagagataaagcaaacagggagggaaaacaaaacccaagagcagttcagaaactgtcttttaactgatctggtctaatttcttctttcttacctagatctctttccccaaggctagtaaattaaataacccaatcagcttctttctattctagctttaaaaaatttttgtcttttccttttttcacctccaaagaaggccctgtgaaatggccctgggtcctacagaaggagggaagaaaaggagagaagtgtctggggctatgaggcagtagaatttgaatatattgtgacagcccaaagcataaattctttaaaacttttgactttttttgagacatgtttcagttatcattttcttttgttccaggaaattaacatctttggtggggtagaattttagttggtacacaataaatgtccaaaagatgctagagaaagagaaaggggataggtaatatggtttggctgtgtccccacccaaatctcatcttgaattgtagctcccacaattcccaattcccatgtgttatgggagggacacagtgggaggtaattgaatcatgggggctggtctttcccatgcttttcttgtgatagtgagtaagtctcatgagatctgatggttttataaaggggagtttccccgcacaagttctcttctcttgtctgccaccatgtgaaatgtgcctttcaccttctgccatgattgtgaggccttgctagccacatagaactgtgagtgcattaaacctgtttcttttgtagattgcccagtcttgggtatgtctttatcagcagcatgaaaacagactaatataccaggcttcaaaactcaaagacaaaggaaacagtgcaaatgtcatggtttctctgcatttggcagaaaaccacaatgtgctgataagagaagccttagagggcaaagcacatcatgaagataaaggcacaagaaatgcaccagtttaaagaggcccctggcttcctaagccctcatgcacaaatgtgatccagaggtggataattgtgaagcagcagacaaacagttactctcacattcaggctctgggcccaggtgtcctctttcaggcttgaatatcctttttcacatttacctcttctctccttcccggcttaccctggagtatcttctgacttggtcattctctcactcccatcccaacttctcacgagttttccagtaagcctctcaaaccaatgaagcatcttactcagttggtggtggtatatcacctatcaatatatttgttatggacctgatgtcaatacctccttcagtaagattgtgtcccttctcataggtcaggaagccaaggctcaaggatttcaagaaacagagtttcactgatagcaaatggcagaacaggattccaatttgagtccaggacctatattcctttcactgtctgaggaacttccaacaccctgatgggaggctttgagaaatcagagcattcagagagaggaggctgatggcatctttgttgaacattcaccttggcatcctgtcaccacccacaagggataagaagagagtgtgattgtgggaactttatttcagacaaaactgttccagtcagcttcaaactgatgtactgaggccaagtgagaataatacccctagcgataaagcagatgacaatttggggaaaacactgaacaaaactgcttagattggaaacaatcagcatctccaaaaccagtattttcccccaaaccatcaaaaatggggctgcctcgcctaatacaaaacatttattgcatcttgttggacaatgccttttgttcatcaagagctgatagttgattaaggacctctctttagggagaaaataactcccttcctcatcctccctctgccacatggatatttagggagacctggcaaacattaagaagcacattgaagcaagtatatatagattgaattaaggtatgacagggcaattcattacgttatatatcagttactgctactcctgtgccctagtagctcagggaagttggctagtggctgctgtattttcacattttctagctggagatgcatggtcctcttgctctcaaaggtacagccattggactataacccacacacagatttcgcctcattcaagatgcaatctaaacagcacacattaatcttcctgaaaggggcgttatcttatggttaaagtggaggtgatattatagtaactcacgtatctttcccttgtattgatttgaacctaacctctcctgagtactcataaaccaggaaaagctttcaatgcactctgccctaaagcagggctataactgtataaatgcagacagaaagggatgtgagatatgttcagctttgaatttttaaggtgattttgaatcagagaaaatagcatttcaaggttttttttttttttttagtttcaagaattcaggaatttcaaataacaaaaacaaagcatattataagtagatgtggggaggaatggctaaagaataggaatacctacccaaagggtagatgaggttgtcctgctggaggatgatcacattggagaaagaagctcagaggatcccaggagaagactaagtgcctttctagggagccctgttcatcaggatgtatggtgactgctttctttgggcggttgtctcatcaatagcagccatagagactcaatatatatcccaagacttttataatcccattggtattacactttattggcactacactttgaatatttcaaaagaatcttaagctccccatgaccaagagtggaccttatgaatgtaggagtggtaaggatgtacaatggaaagcagccagcacctattcttggatgtggctgaaaggaaccacatggagatctcttgagcaggcctggaggtgaaatactcccctttattgcagctgttggttaatgaagatatgttgagggaatttcacagctctggcatcaggtaggagactcacactgattctgtatgattctgacccagttgtcaaaacatagtctcccagcaggactgtgctttgctccctggtgactgtattctccatttttacaaactgctgtttgcacaggaagcctgccttggtcttgcccttgtcctccaagattagcattcgactctgaactccaacatcaagcctgttccctggaaatcaatgacaggtttctttttgtccattggaactccttgcattgcctatttctattcttctgcccttagaacactgcactgactcatactgcatgcacattctcaaggccagctccttgcctgacccactccatgggtaccactgcccctcctcctatcgtgtacccttcccaggagcgtatgtctagctcgagtcttggagaagcagcctgtcctggagagagtatagatttggagtaaggttcaaattcttgtctggcacttacaagtgatgtgacattgggcaagtcataaatcctcctttaacctcagcttcctcatctgtagagtgggaattatcatcattaccaccacaggaaacacatgtaaaatacagcttctggcataaagtagagggtataaatggtagactttacctactccctccatagtctgtgtttttgtttcaactctactatgtgacagatcagaaactttgtttcttttggagagtgtgccaaagagcaagctgggaaaattccaagggtagcccagacactgtgaacagggtagaaactctttccttcctgtcttaccttttctctcaggaatgagaatacagcccagggggataggctcgcagttacagaactgtagggtaatacaaaaccggtgctgccactcctattcaacataatcctggaagtcctagacagagtaatcaggcaagagaaagaaagggcatccaaattggaagagaggaagtcaaactatctctcttcccatactatatgatactatacctagaaaaacctcacagtctctgctgaaaggtttctagatctaataaacaacttcaacaaagttttatgatacagaatcaatgtaaacaaatcagtagcatttctgtacaccaataacatcaaagctgagagccaaaacaagaatgcaatcccattcacaatagccacaaaaagaataaaatacctaggaatacagctaacgagggaggtaaaaatctctacactgagaattataaaacactgctgaaagaaatcagagactacacaaacaaatggaaaaatattccacattcatggataggaagaattaatattgttaaaatgaccaaactgcctgaaacaatttacagattcaatgttattcctatcaaactaccaacatttttcacagaattagatttaaaaaaatctaaaattcatttggaaccaaaaagaacctgaatagccaaatcaatcctaagcaaaaagaacaaaactggaggcatcaccctacccaacttcaaacaatactgcaaagctacagtaactaaaatggcatggtactcgtagaaaaaaaagacacatagaccaatagaacaggttagagaactcagaaataaagccatacacctacaaccatgtcattgtcaacaaagccaacaatagcaagcaatggggaaagaacttcctattcaataaatggttgtggaataactggctacccatatgcagaagattgaaactggacccttacctgtcaccatatataaaaatcaactcaagatggatcaaagacttaaatgtaaaaatctaaaaccataaaagccctagaagaaaacctaggaaatccattctggacattgacttggacaaagacttcatgacaaaaactccaaaagcaatcacaaaaaaaccccacaacaattgataagtgggacataattaaactaaagaacttctgtacaacaaagaaactatggatagcataaacagataacctataaaatgggagaaaatatttgcaaactatgtatctgacaaaggtctaatatccagaatctataagaaacttaagtcaacaagaaaaaacaacctgcattaaaaaatgggcaaaggacatgaacaaacacttctcaaaataaaacatacatgcagctaacaggcatatgaaaaaatgctcaatatcactaatcattaggggaatgcaaatcaaaaacacaatgagatatcatctcacatcagtcagaatagctattattaaaaagtcaaaaaataacagatgctggcaaggttgtagaagaaaggaacacttatacactgctggcaagaatgtaaattagttcagtcactgttgaaagcagtctggatatttctcaaagaacttaaaatagaacgacttttcaacctagcaatcctattactgggtatatactcaaagtaatataaattgttctatcataaagacacatgcatgcttgttcattgtggtactattcacaatagcaaagacatggaatcaatctatatgcccatcagtggtggactgggtaaagaaaatatggtacatacacaccatggaatactacacagccataaaaataaaaagatcatggcctttgcagtaacatggatggagctggaggccgttatccgaagcaaattaatgcaggaacagaaaaccaaatacttcacttataagtgggagctaaacactgagaacacacagacgcaaagagaggaaaaatagacactggggcttatttgagagtggagggtgggaggaagatgaggattgaaaactacctattgggtgttatgttgattgcctgagtgacaaaattacctgtacattttgtcaaatgtccaaacccccatgacatgtgatttacccatgtaacaaacctgcacacgtacctcttgaacctaaaatagaagttggaaagaaaaaaaagacagcaccaaagggcaaactggaaaagctaaacctgtcagcagatccatagggggagatatggaaacagcacctagagcacagcttgaggtccgtgtggctggacaggaggacagtgaaggtctggaagtagaggtggtcatgaaccttggccatggtgaaaaccagtttgctcaggcatctcctcaaagttccatgaatgaacctggctaaatgttttaatgaggtggctgtgacaaaaaaaaaattcccgcaaatcaattcatttctgcctgtcagtaaacccgggtatggataaaataaaattgggtctaactttggtcccactctaccaagaactcaaacaaagtttctgagtgagcagcgaagacatttcccctggtattttacactaacggtctagctatggctggaaccaggcagttttcaggaataaatatactaaaagagcagaaaacctgttgcaagacacattactgtcctgcctttcataaagatgatgatggcataaatctggcccccatcttgtgtttatcagaattaatgcttcaaattttattccagtcatttgaatatttaaaatgaagaaaccaggaatgaacaaataataaatgaacaataaatatgtgaaggccattcagaatctcagtagcagagtgatgtatagtctccttctaaataaaagattgaaatatgactgaaatttagtgtttgcagctaagatatgtagacgagttcaaactcaagttggatgaagtcaaagaaaaacacccattgggtgaggccacaaaagtgtaaactcattggctcaaaaatcagtattttgggtttatatgccagtgagacctgtattaaatacactatcttacaaactttggggtttctaatttaagccagaaagcttagttaatgtttcagccctgtcagatactaatgacttgtttccttgagtaagtggcttcacattttttgtcttattttccttgttatttggagcacacacaaaaacctcaccacccaggccctactgtgacaatttcttgaaacagtgatgggcttttctgattgccacctctaagtgtctactgctgattttggcacagagagggtgctcaagagttgtctgttaaatgcttgagtgagtgaatgaatgaatgagaacgtgagaatatgagataattaataagaaagtgctttggaatggttacatgtattttaaaaataccactacttttatatttctgcctttctttgtttcttccattcaatatgctcttaagtatcttcaaaactctaaggacttccaaccaaggaggtcaagctttgtagcatgtaaagagaataatcaatttggccaattctgaagatgacagtttctaaaattcaaaataaaaatataatgtcttagtgaaaggaaacagccaatgcaaaagattttttatttactattactgtctcatctctattcaaacatttaatgttcactagcaggtcatatgttatgaacactttagaattttattgaagaatttaataatttcttacctttgcacatgtgatgcactttagacatatataaattcagttccgtttatttcatcgatttaaagtaatacacacacacacatgcacacacatgcatacacacacacatacacagtaaagtacattgctcctagttatcttgagaagattaatcttatttcaaagaggctctacatgatttctggaattaggcactagatttaaaatgttctactagggaatataatatatggtgaaaaaatggcaacagaagggcagagatttaggtttccttcatagggaatgatgatgaatagaaatgtacatctaccattttctgcagatgtagaaaatcgtattttctgctcttgtgattttatgcaatgctaaacttttccataaaagaaaatgataaaatccatctcttctcagtgaagtgagtcctcatagattttatgagacatatgcacctcctggcttggaggctgccaggtgtttggccccatgctgctgaccttagataagtaggcagtaataagcaagaaccttgtggccaactcttgagaggggctcagttatagttgtcaaggagacaatctgcttatcatggtttaagaatcctggctgggagagaaaaccacaatgattttgtgtacagcttagctccagccatcttcaatgatggcaatgtcatcagtgtgagtacccataaaaagaagaaagaaaccatttcactaatgctgataaaaattaaaacgacaaatgcaagccttggaataagcattttggcttttcctctaatccctatgtcctcttaagataaagcctggaacctccactataataagcaagtactaatttttagtgcttacaatatcatatctgatcttctcaaccaccctatgagataggcctagtagtgaataatgggcatcagttttggccatccatgtctgagctccccttctgtgttagttacctataaatcttgatgggggattttccagcctctattgaaggttaaagcagttgtaacacttgggttctgccatcagatgacctgggctggattttgacttaggttaaagtagagctttttctctggaggtggtggcagtagtaattgtcacaaaatgaaattcccagcacagaactggcaatgatggaagccttagtgtctaatgcttagtgactttgatttttttttgtgataccatttttgcagcctggttgtatggttcaagcctgattctccagttctcctaagttcactggggtatattgatatcctcttattaagttcattttgtgcttcagtcaaagccagcaccatctgacttcaaaaactgtgctcttaaacctattgcttggggacaggaaaaaggggcaaagctgtgatggaaagcaagctaatgtaattcagcaaggtcatctcctattgcttatccatactgaccagacattctggtcaaaggacaagagagctgagtccagtgatctacaccacagactgcccagggaacaacagaagtcagattctatttcaggttttccaggatgatttatttagctgaagtacggtgagaagtcccaaagttctgacaccataggaaagtaatttgaacttctcagagaaattttgctcagcaaatatacaatatagttttaaggtttttaactctcacttgtgctgacattttacgacaaatagtgtatatttaataaacaatgtcatagactctcagggttggaatgttcctaaaagctaactggtccacctgtctgaccaatgattgagttcctgaccaataagcctccctgcttggcactttctatgcagggcgatattacttcctagccctttgttctatctttgagtgtttctgactattataaaattttcctcttagtaaatcagtataggtctgtaggtgattccttctctttggttcctgcactggtacctaatataaaatagaataatttatagcaccctcacttctgccccaacccacctctgatttctgccgcaactgtggcagacagccataagcctttgcatctctttgcttctcagcctctgaattttctctgacactatgagaattcatgtaggaggcagcctgcaagtgtgggtgaattatcacattgaggggtaaccctgaacccatgagattcaaaaactgaagggttaacgtctgagcatctctgccttgggagggaaaattctgaggtgcattctacatagctcctcaaaaagtctccagtgggattgggcttcagatgcccatagtagtaacagtcttccacaatcttttttattttcttccctgtctcactttccccatttcttaattcttgctttctgacatcacccctcaaataacatacctatattctaatatttgccttaggctctactttgaggggcaccaaaactaagacagaatctattactgatatatctggttcaagttaattaaaaaatggaattattgcaaccaatctcctactatatacccatcactgcatttggctatttcacatgaagactgtagaaagaacttgggatttagagacaaatgggcttgtgtctaaatcccagttgcacctctcactatttttgtggtcaatatctttaacttcttggagcctctgtgtctatatgtgtagaatggagatattaagacctaactcagaggcttggtgtgaggacatagcagacataaaggatccagaccagtactgtcccatagacatggctcctttgcttaaattatttaatccttgcaattctgagaagtacatattccccactttatagctgagtaaactgaggcttagggagattaagtaatttaactcttctccttggtcacactcttcagctatcctgccctctttgctatcctcaaacatacaagctatagtcctgccttgaaggcttcctttgtttccaacacctgcaactctcttcttccagataccggcttcattacctccctcacctccttcatgtttctgcttatttttcaccttccccatgaggcctactgtgacgccatgaccacttggtttctcccagtcctttactccatggctcccccaatctccagagctgctatttccattctttcttattttttttcttattgtttctctcctcttgacttagtgtatgttttgaaaatacttcctttaatttcagattgtcttattacttcttgttcttcgggtaaaaatgtgacagtttgttacatctgccagcactctctctctctctttctctctttctctctctctctctctctctctctctcatggtggcttattccctggtgttttgtcattttgtctgtgagatcatcttcagcaggaattgtatttcttgtgagtctgggtgctcagggtttggaggtgtccctaatgcatgggttttatgtttgcttctgccaagaccttaaggaagccataagttctaggatacatgttttatatattgttatcttgatttgggcctttgcgtattcagatagtataaatcagaactatgttaagtactcccatatatgaccagctttcatgatgctttctttgccaggttcctttcttcattctctaatcagggtaacttccatatctatggaggggcttaaccgcaaggcccaaagcctcttctcttgttttacatgaaggtaggcattggttaaagcaccagctctccaggtctgagggctaataattagatcttatagctttatgatctggtcatcaatagcttctgcccagaaatctggctttgttcctcttcttcatttctggcaccgagaattgccttgccttaccttcaaactcagctttgtgtttactttatacatttatgttgtctagtatttctttgtgtttggaagacagagttctttatatgtcagatgagtttgccagagtgactggaagtttctgagtacttttcatgtgtgatcccttattagaagtgaaacatacttcagacaatatggaaattcatgtaggacatctaaaaataacactgatattgacaactgacatttgtggagaatttactttgtgacagataaaattttaggggctttacattaccttttctaatgtaatcatccaaataactccatgagataaacacttatatgtctatttctgagaagcagaagtgagagtaacttttgaaggtcacacagttgattagtggccaaggcacctagggtaaagcagtatttaggctgatgaggtacatacatattcttgccccaccacttccagtgtttatgacattgggcaagataattaaactttctaagaaaataggaatggtacaaataatgtacaatatgaagattaagtgagaatatccttaaaaagtacatggcgcagtgcttggcccatagtgtgctctgtaaatattaggtgttattacacagcaaccatttagaaatcatatttgtattgtctggggaaaataaaaagtcttctctttggatatgaaggaatgatgctatccttctacaatcacattctgagaagttagcaccagcacatgctctctctgactgccagacggtttcctgcacaccttctgtgaacacatcagttattatcgacttgaacttctgcctctctatttgtatcttcacacattttaaattcaaattacttgctaattgatgcacccatcatgcttcagttcatttcctggtacaccaaagtcatttgtaagatttctcctgggtctccagaattaagtttttatagacaccttggaagggctgatttgccaacttggtctagagcaatacatggggagggagatgctggatgtcacagattgacttctgcagaagcagatgttgaagtagatttagggggttagatatttattagggattagcatctatggaagaaacagaaataacaggattcagcagagggagaagatgaactgcaatgcggggttgatgaagtcttggccaacctggtggggagctctggagcaaatacgatctgtcagaattgctctgtgttagcccacatgacaaggctttttatatcccagccccactaatttactgactggatgccccgcaaagggcagagcttgtgtgaggtgttctgcaaccaaggcagaccctgatggatctggcggctgaaggctctctgatgatcacccttcctaaagctgggcatcaacttttcttgaaggaggatctgggtggtgcatctctgagtaacacatgagagtaactggccatgcaatttcatcactcttgtgatagaaactttaggcaattaccaagatgtctgccttctctcttacttccatcttgtgtaagagttaatttggtagcttgactttcccctacttggtgataagttcctggaaggcagaatctggaaactatgaatctgaagaccgtacaggacatatcacagtgccctttatcttataaaggtggtgcagatgtttgttcaataaaacactaggagagaattgtctaagaaccacaggaaaaaggactgtccaatatatcatttttgagtaattattgagagaaaaagattaattagcacttgtatcatacatgcttcaaaatgaatggcgaatgtaccaaatttttaaatataaaaattaaaaccctaagtctaagaaaacataggtaaatatgattctgattttgaggtattcaaattttagaagcaaatgaggagcctacaaaagaaattcatagttttcagacataatttttaaacctccatatacaagaaaaatctgctcaaatttaaagacaaatgagcaattggaatttaaaaaaacaaaagacaaataaacaattgaaaaaatatttttaccagatcaagtcatattcttaataaataaagaagttatgcatgctgattaattaataaaaatacccgaatggaaaaaaatggcaaatgatattgaatgtacaatttcaaaaagaaaaaatacaaatgatgaagagcataacagaaaaagtttagcctctttaataatcaatgagttacaattttaaaaccgaggggaaagttttttaggtacctaagtgatagattttaaaaaggtaatactcaatgttgacaaaggttggggagatggaatttacttatagatttggtggcagagtaaatttatacaacttttcttgaggacactttgtctatatgcataaagtctttcatccaaccagtctacttttaaatgttttccctaaagaaattatctaagatataaacagtgataaatatccaataataagggaattaggattaaataatgatttatccaattactgtgcagcgattaaaaatcacacagttgaaggatttttaatgaaattagaaaattctgaggctataacgttaagtggaaaaaagtcaaatataaactgtgaatttaaatttacttatatttatacatacacacatatatatataatactaacagaaattattagcaatgattatgtcgggatggtagaatgatgacaattatggtttttccacattcttttctttattcttaaaattttcacactgtgcacatattaatgatattcagagaactcaaccagacacacacacacacacacacacacacacacagagagagagagagagagagagagaaagacttttacataagaggctaataataaaggaaacttccacctggtcctgggtgtttaccagccacccatcttaggctactcatcctacatcctttcactttcctcagtcaaaatacttaagataatggttcctgttctggagacgtacacattgctctagagtatagtaaatatggaactgcacatgtttgaatctaaatcccagacctgtcaattactagctgtgtgtcttgggtgactgacgcccttgtactctcagagactcacattcttcttttacaaaatgaggttataaatatccacctaatagtagtgtggcaggaacaatgtgatatagcaacaagtcaaagcacagacttgggagctagactgccttggttcaaattttagctctgctaccactagttgtgaaaccatggccaagttatttaacctttgtgtcacttgatgtccctctatttaatgggagatcataatagttgccactttacagggttttaggaggattatgcaggttagtgagcatgtaaagcaataccagtacatgctgcacactatgtcactgtttgctatgattattcaatgaggcatttaatgtaaaacaccactgaagaaataaaattcagttaattaagcatttgagtgcctactaggctaagtcctgtgttaggggtccagaatgttagaatatataacctctgtttttaagaaagtcttgattttgagggggcatatacacaaggaaaaaaaatccctgcagaatagagaaaatcaagttagaattctgcacaagcaaccttagaagcacaaagaaggagccctacatctagcccaggagttcaaggattatatggtgctgaagtttaaagcatgtaagtaggcactcaatctatgtctgttttcttcctctaattccattctccttctaaccacctccccttgtcagatcatttagtggacattggatgacaagaaataggagaggaaatcaaggagaatcgtgtttcttctccctaataccacctacccattctacctatccatttcaggcagcctggcagtataatgccaacttggattcatatatgcacacttttgaaaattcaaggtcctgtctccttttcctgccagccagatatgggacttatatacttctccctgggttggtttgacctttaatgaaagactatgctaactcctgtgctcacaaagcagtaaatacccaagtctttctgtcacagagttttaggaacacagggacatctaaaaattaactaagctgcttagccaaagctcaccttccccaggggtgcttctttgttctgcaggccaattgggacctgtctggataccccctaccccaaaattgctcattttgtttgccagtcactccttgcctggctctaacaggcacctttcttaggagtctaactgagaaatttaaatttctctatacaggccaagcctcatgagggctatttgggaaagccagatgcaccctcagtctagaaatcctgcccttcttttcttcaccctgtgaattcctgcttgtcttctgagactcagctgtggcatcacctcatctgaaactctttcttgacttctcttgccagctcagttaggtgctcctcagctgtcatttgaagagtgataatttgatgccatagtgattaaatcctatcatttatttgagaaaaaaaccccactgatttgtatacacaaatacaaaaacatacaaatttgccttctttaacaaattttgtaaccttccttttgccccttcaaacagtatttccattttattttcctcatagaattttagcctaatacaatacaattttatgctttaacatgttttattgtgcagtctttagtaatctttaccaaaaaaaatttccataactcaaagtgttaaagatttttgtttggattgagttttcattacaattttaagtacaacattgatcaaaacaataaattatagtctacattttgatgattactggatttaaaattataattcagcatgcagctttaatgagatgaatggctactcctcccacaattacttaatgtatccatgaataaatatgaccaaccactaggataaatgagattcagcctcaagtacattcctatttttcattttaataaatgcttacaactgagaaattttttcttataaataaattgacatgaatggaagttttgtaatagccttgtcactcttttttttgcactttttccaagttgtatatcaaaaccacagtgattcatcagcaaaaattatttttagtcatccaacaactgacaagtcaatgaggtctaccttcaattttgtggaaagaaaagaactggaaaacctgactttcagaaagatttgattactgaatcaggatagttatccattttctcaacacctaaactaatatttcaaatggccccttgtttagcacttggaaggtttcagtaaaccacagggtttactgtcattatagacagtgtcccagtgctgacaagcttactttatttgaaaaagcgtaagaagtatgagttcttaggcagttcaattttaggaaacagtacagatggaactggaagatctgcaaattaagccctgactgcgtactcttcagaaaatcatcactttgccccaggggtggtgtttcccgatttgaagtctgttacttaggtgaatcaattaacagatcatataagattgggaaggcaggtaaattattgatacacttgcaggatggagaaatttctcatgattctctgggaagccccaaccccacggccacttggtgccttggggccatgttggtggaggactcatttcattattaagtctggcattaaggctgctagaagacctcattaagttatttcagatatagggctataattactcagtaacagaactggcaattttctgcttgcatcagaatttaaggaaactaggaccagaaaatgcctatgtatttcctggcagagaggaccagcctgggaagagacatgaggcaggaatggttgcaatgattctctttggtagatttggctactataacatgaaatgatataggggtgttgccattgaaaagtttattcttgcccccctctcatatatgtttccatccaatttcttttataagagaaaaatcaatcagcaaaattatatataataaattctttagttccattttcttccacttcagattccttttcattttcaggaaagatattttaataccagtgtaagagtgttctgcacagagtatttatactcaattttaattcacccaaaaagtgcttacttgccttggatgccctaaacattaccatacccgaaaactatgtccacatttgctcttgaagaaatctcaacctatggcatgaaataccatctatataccatataaactcaaatgtttatacatatacctgatctctctcctaagttcccaatgtgaatatcccaatgtgtacctgccgaccagatacctacactggaaatctcatacatatatatatgtatatgtgtgtgtgtatatatgtatatatatatacacacgtgtatatatgtatatatacacacgtgtatatatacatatatacacacgtgtatatatacatatacacacacgtgtatatatgtatatatatacacgtgtgtatatatgtatatatatacacacactatatatgtatatgtgtgtgtatatatgtatatattgtatatatatgtggagtgtgtgtgtataatgagtgcgtgtgtgtatatacatacatacatacacacatatatatttacagtgtaggtatttccagtgtgtgtgtgtgtgtgtgtgtgtgtgtgtgtgtatctccaacaaaacatgccaaaaccagaattgttttttccactcccttctcccatgtgcacccatgtgacaccacagtgtcttttgtttctataagtggccccacaatgcactgagttgcttaaatcaaaattctgttggtcattcgtcttttcccataccccaaaatctaatccaatccatcagcaaataaacattttaggtaaagctgtgaaggacaacaccttaataacatttctcatagccttccatttttttctccactagaccaagagtgacttcatggatatttgccactgcctactcacagttttcctcattcttgccaccctttcctctttcaatccatcttctacacaggatcaagagggaaattttaatcatggattgtatcacatcactcccctgcttaaaattctttgtggttttctatagttcttagaagccaaactttttcccataccctataaagctctatatcagttatctttagtctgtgattagaattactgggagaacctaaaataacaacaagatcaacaacagcagcagcaacaacaaccaaaaatcccaaacaccgatgcctgggcaccaccctagactagttgatttggaatttctgtaggtggagcatctgcatttctgatacatagtcactatctctctcactcactaagatccaaatatacaaatctatttcttttttaaaacacacagaatttgtacctgcctatggactttttcactggctatttcctctttctggaatatttaatactcagattggcacattggctggctccttctcatcacccaggtctccgctcaaatatcacctctttaaagagaagagagtcagagaagagggcaacagacttgtaaaccttcatgtctgtatacatgagattagagtcctcatgtcaggagttactccttgcattctccagtcactcacatatcacatgccctgtttctatgagcttgtcagtggttgctctcccattttcttgcctgtggtatgtagccatcctaagaagcaacagaattatcaagttagctttttaactcatgtttacatgcatatttattcaaataattataattcactgggacagtgactgtaagaatgtatgcatatgtatgcaggattatcaaggtcttaacatgccatgcaaacaggagtcatctctgactgcctctgaggaatgacacttctccttgggatgtatcctgacatacagacctttatgatcatccttcagggaactttctcaagaaaatactcattgaaaatccagttcaattttggaaacaacttttttttttttttttagatggagtcttgctgtgttgccaggctggagtgcagtggcatcatctcagctcactgcaacctgcaacctcctcctcctggcttcaagggattctcctgcctcagcctcctgagtagttggcactacaggcgcgcatcaccatgcccagctaatttttgtactgttagtagagatggggtttcaccatgttggccaggatggtgtcgatctcttgaccttgtgatccacccacctcggcctcccaaagtgctgggattactggcgtgagccaccacacccagctggacactgcatttctagggatgtggttgactttggtataaagcccttagtggtagaatgaatttcaacttagatatccaagcccaattttgctataaaggatcttcctgtattcctccactttcaatatcttaataggacttgcattgataaggagtgctaaaacttacaacgtacttttacaggtagatgttcttccttatgttctcccttaactccctgggtagttgaggcttgagtactaggtagttgagtaccagagttcccacatatgagtgtgtagcttgtgtgctataaaagtgtgcctggatgaaagcttggggaatgaaactcagtccctcaccaaggcagtcgccttccttagggcaaagtcagcccagaggaaagggtgtgtttcccatcttcaaccaccagagggaacatttttcctatttctgcaacactgccatctgtcgtggcttagccatggcagtactactattttggttagttgtttattgctttattttgcagatgaaaactccgctattgagagaggtgaaatattctatcccagcagaaaatcttccagtgagtcaaatatctgctagtgagttgacaaaaaaaatctagagctctttccgtcagcacttggaaatattcttattgttactgttggatgacccctggtttgtagacaccgcctatagggcaatggttgggttcagaattacagagtgagaggcataagcatcaaagcacagagaaacatattaataaaagcctctgagaaataaaaatgagatcccaaatccaccaactgactgaacagaacccctcttggccaaggggacctcagagtaatcttgaaaattgagttctcagtcatgacagtatgtgaggtcagacattccttgtaatatcccctcccttgataatcaccattaagctttcttccctaaggaccaaacagaaaccagccctttacagagactctaccactgatatcaactaaccagtaatgactgcccctcccttttgtggttttaacaaaacagctgaccagcatttcttcctgataagagaccacagactatgaagtggttctggccagtctatggagggtgtacattaggggcttttgtgtcctgtgcttcacatttgtcatcagagggctgaaaacaccaccctcgggtcacgctaacaaggctgtattttgaacatgggtcccctggagaatcatgaagctcagttgtgaatgtgtgtgtttctccttttaaaaatatttatgactcctcttatagctcactaaatatgtaaatgtggccacctcagcacacactcctgttcccttttctcctcccttgaagagtctgtttttggctcctggccagaggctatgcttcccagtctgtcagaatggccaccatgcaggttgcaacgctttatgagaaataaagctcttgtttccacatttatgaacctcatcattcttcagttgacatctccaattccatgggagtcatttaacttatcagagttcttttctcttttggaaattgaaagggtggactcagcaccaaataaggttcctctgggctctaatatctttggctagaggagatgacagagttttttttttttgtaaaaggagctatttatttgctcttccatcacagctgtccaaggttatttgaatcatagccatcttgtgagaagacttctgccacattaagccattttggaatcatcttcagcctcgttaacgacgtagcagggttagtttggtcactaccgacctccctttttatcaaacttgctgttgaattgaatctctaatttggatgaagtcgggtgtctcatcccctggagtttaattacacacacattcattgattctgggcctgctccctcaggtcaagagcacacaaccacctcacagctttctgcaaagaggacatgttgtataagtctatgcttgcagtctttggaggaaatgatgaaggttggagaaaggaagcaaataaatacattttttctaagtcaattcaaactagaataagtcactgccacacatcatctgccccctcctccccagggtcccccttcccctggagcctccatcagtaaatgaatttaacctaatttgctgctctctagggagaatgcattcaaccacaagcttcccaaggtgcttccgttcctggtacaaaaagctgaaaatgtcatcgcatttgcaaatgaacagaaacctcccactcaaagagcatcagtgccactgtggctcactgaagcagctggcaggagccttcctctcactgccattgctttgtggttagaataatacacacatagtcttttcatctaatgacgttggcaagtttaactttctttgcaaaagtaacaatgctttgccttcaaccagcagactgttctctctttctttggaaagggcagaatggtttctatttactcctgatagggccagtcacctgcaacctctagacatgtcttcacttcagctttaccccatgctgtataaactccataggtcacagtggctttgatattcttcagctatgaaagtctgaattctagattgagatgctggccccatcaagcacatctttcttggcgttttttatttgtcaaggagggatgggctcaaagcagaatactttacacccctcatgatttgcaatgacctagcttcaatcttttctcagatttaatattttctgagtaaggggccctgaactctggcaagaggtggcttctgggtaaaggcagtacaggaaatctccaatttactggggctctttccatgatttttgaagcatgaagggaccatcatggtgactggtttacagcactgactaatccagactaaccagttcattttgtcacagagaactcccagagtgtggccaaaagtgttcgctagagattctaccagaaactgcacttacattgtattgcaagcttgccaaatgtacatcccagaaaaggctaacactcaggacagctcattacatgttttcatctattctgcaggaactaggaccacggaaatgagaaactctagttataaactttactgacactttaaatacaatagatacacaaggctgggttaagtattatcctccatctagcaatggcaatctggttggtaatcgtgcactaacactaaggtagatgttctgagatatataagctatcctgctcagatataacacatcgatgccttttacatcaaaactcactgaatgagctgtgtagaggcctgtctacaagtgcactcagtgaataaaattaccccatgcattactcagctcaaattgccataataaaataccacagactgggtggtttaaatttacacatactctggaggctggcaagtacaagatataggtacccgccaatttggttcccagtgagggttctcttcctggtttgcagacaactgctctcttgctatgtcctcaaatgactgagaaagagacctctggtggctctttctttcttataagggcaccagccctatcagattagggtcccacccttatgacctcctttaacatttataacctcctcagaggccttatcttcaaataccatcactttgggggttaggacttcaacatatgtatttgggagggggaacacattcagtctataacacccacaaatagccaattatgggacataggacctcaggtgctctatcattgaacctgtgccgtaattatgaaatgaacactcttcagaggcctcactcacaagtatctgccaattaagatgtatgtgtggagatgcaggcaatgctcattcagtcaccaccaggggcctactctgtttcatgacctgtacaagacaatgggaagctaaataggatattgtttctacccttaagtatatcacaccataagagagttaggggacatataaaatcagatcattacaaacacaaaaaatggtctaagtctgatgttaaatgtatacctacagtgttatgaaaattaacacctaggaacatcatccagcctagtttatgaggtggtgatgagaaaaaaagcttcctggaagaagtgatctttgagtctgatatgatagttttttgtgatatttgagagtccagaaaggaagtgtttcaaccttccaactttttctcaactaggcaagtgtttagaagcaagcaaggaatgacttcttcttctcttctcagcctgatcaaataatcagctgaattaggacacctcaatgtatatcaggtggtatatcatattctgttaatatggtattactgcaaatgccatccataactcaaatttcaccaagaaaagtgattacttggaagcttttatttttccatcttcactttttaaaaaaaaccacaaacccaaaagaaattaataagataaaagcatgcaaagcttaacttcattacactttgaaattaaattgaacttgcatgtcccatagtcaattaaagacacttttttttcaaactctcctgacaaggaatttccaaagagcttaagttgtatttactcactttgtggagttttgaaaactggctccgacagaaaaaaaatatgaacaataccacggatatgtttttaactttttaagctatcccatgagagaccagatataatcgagttaggaaagacacaattagctgggcaaggacattttcctgaagtaaaaataaactcattaaaggttaagctctgggcagcatcattaagaccaaggcaaggaacagagctgtgatactaaatattaccactattataatctcatttaagacgtggcacccaaggaattgggttaggctcagaatcctccttcacgggcctgcaagagtgtatttcatttcatctcactgagcctaccctatgggcaagagtggttcacagaattaggactatgctggaaaagataattattttctacctactctggtgttgtgttttgtctttaattttgttttttaaaattttgttgttacccccagtctctgaatttaactattaaataaactgaagtaatattctttcacgacctcctccctttcctacattcctcagcaaccctgaatgaggctctatcactaaatttggggccacatacaatcactgttttaaatagaagcctggatccccttcagccactgcaatcactcactggtaaaacatacccagcatgacaattcagtggcctccatgtgcagattatcctagggttagtaacgaagtggccaatgccagcagttagagttattgctgtctctatcatcaaagaacaagtgtaatagagcagtctttagtttccgagatccttaaacatcaggtggattgttttttgttggtgcgtgtgtgtgtgtgtgttgtgtgtgtgtgtgtgtgtgtgtgtgtgtgtgtgtgtatttcatacatctctttctcccacaaaccttttctttttctttttaattttagattcagagggtacatatgcaggtttgttacatgggtatattgtgtgatgctgaggtttgggcttctaatgatcctgtcacccaagtaatgaacataataccagataggtagtttttaaacacttgtccccctcctctgttttgtaattctcagtgtttattgttgccatctttgtgtctgtacctatccaatgtgtacctcccacttataagtgagaatatgtgatgcctgaaaacctttcctaaccatgccaagagagtttgtgcccctatttaactactgagattgtgttgcagttctcctaacacctaataatacagacctgtttgcaggtctcctaccattatcacatgacaagcttcttgaagacagcttagaaacctatatattcttagctccttgcaagtgcataacactagagtaactgctcaccaaatatttactgatgactagatggacggataaatggccatctgagccattggatctgagctattacttgccaaaatatttaacgggtgagaaaagtagggactctctcaattctgtttagtgcagtaacttttgtgggaagaatagccctgcatgaggccctcctactgctcctgatgttgtccatgtgcaggctggggaagccagggtggagatcattcaaaaaaaggaatattggggttataattttggaggctttgaatgtcatcctaagggtgtggccttaattccatggtgaaggtttggaataagcaagtgacacgattagatatatactccttgggacctactttggtagcaatggaagaaggccaggccaaaagcagacatgcctaacaggcaacttcttaattttctaagagaaacactaagaaggcttcagtgtgggtgaaaagaagggcatgggattgggaactattttagaggtaaatgcatcagatcatcatagcaaaaattcatctagaaaaattttcaaatgtctcccatatgggttgtaaagaaaaaggtagagatgagaaaaaggacagagcttaaaatacaagtagggacttatgtctagtagagtaagtatccagaaccctggattgtggtacataaatatatattttctcagatgatactcatgggtagcctccatcattttttcaaagggccttggagaaataaactgcttctattagtaatgcccacagcaggccaatcaatcagtactcagacagtacctggaattttctaaaaagcttatgctgctttccagattgaaatagggtccgctttgtttttgcactttattgcatttcccaataaaattctgtctagtcactggaaaccatacatatatatatatatgtaccatatatatatatgtaccatatatatatatatggtacatatatatataggtacatatatacgtgtgtgtgtgtgtgtgtgtgtgtgtgtgtgtgtgtgtatatatatatatatatatatatataatatcactgctgaagagttgaatctatacgattagggtaaaaaaaaagttgccttgtgaccttaaatagaaacaatagtagaatcaaaatcaggtgtcctaaaggtctctgccaaagtaatatgtcagtcaataaaagagaaatcgggcaggttggagaggtatgggtcgttacttattatcaaagacatgactcaactgtgggttagtgctttccaaaactgggcattatagtgcaaaatattccagagtataaactgtagtgtactcaagtagtattttctcaggcttctgagtgctgataagtattcagtaaatgctcaacttcaggactcagtccaggtacattgcctagtggcaatgcctccaagccgcgctaggatttgaaaagaactaagccaaatgccaaaaaaaaaaaaaaagaatgtagacagggacactgctagggtaatagtagtaataataaaatggttttaatcagatggactgatctttcaggtctaggaaatagggtgggggaagttcaggggaaagataaattcagggtcggtttcataaatcaggctatgcatctaaagtaagagagaaaggttaatgcagaacatgaccagaaggactttggtgagaatcaggttctggtcacctgatcaaagtagagtgcaagacttcctttccaacgggcaccagagatttgaggccgtagaaatatgggagagaacagggaatggactaagtgagtaagtcaaccacatctactccttgtccagtctcttatgtcactgttctgcggttatactagtagagcatttcctcatctgggaagtctgcaacttaaagtctgtgggaaatgttcagtttattctaacaaggtaattcatacagaaaagggtcaagaaaactgggaactatcattcaaaagcctcagacctctgctctgggtatagaacagtagactattacaaactcttctggtttgcacagaagaaaaatgttgacaaattgcccagctgcattttctgtgttataaaattgaagtagggggaggcagtcagcagatgctggctatacattgcacttagcctgggatggggtcaggacagcacggacagacactgtttaatggaaagacctatgtcacaatgcactgaatttctcacagcaaggctgtaaatgacatcaaaatacagacatctaagctgagacccttagcatcatcctcaaagcacaaaatgttcacggagggaaaccctggaatctccccctgaaaacctgttaatgtggctgagagctcaaaactgaatcattgaaaacagtatattttatggacatagagaaagatgctgcttttctcctgacaatcttcaaagagggaccaggtcatgataaagcaaagctgaaagtcactgcagagcaggtcagcaacccacagagacaatcttccctaaattggcactttaatgccttgggttttagcattctggcctcagatggaaaacctgtatggactcaggactggaattagaaaattttaaggttagtttgttggaggattttctaagttatctatccaattcagtttccagggaggtagtgaaaggttacaaaaataaataaaaagacgaagaagaaatgctttgaagccagaaatgtttgaattcaaatcctggctctaccattagccaggtggataaccttggaattcgacaaattacataatgtcctagagggatgaattttcatttgagtatggttatgattgcacccacatctgtgaggatgacatgagatgttgccagtatcatatttagcacagtgcctggcatatagcagaaaacaggaaatgctaactctcttccctttctctgtccagctttctaatacagtcagtcctactcatttagtttgttatctctttctagagaacaaaagcaaaaggaagttttgctgctaactgtctctatcaagtttttctacattgaagacaaactgtgtatgtgatttgttctcctcaaatgagatattcaggtaagaatactctgaaggcatagacatctgggactctctcctgagtaaagaatttaaaatatgaggacaactctatctgttcaaaagatattttaaaatgttgttaggcacctactttgtgccaggcactgttctagccactgaaaacccatactttagacaactctctgcccttgtgaagctcatacccaagctgaggagaacatgctgtgctcagaaatgtttattgcagcactatttgtaaacataaggaactagtgacaatattagtatttaacaacggggaaatggttaagtaaattacgtacctctaattgctggaacattaagcagtgatcaaaatggtggtcaggaagagtggaaaaccgtaaagactaatctcttactaaatgagaaattaaagttcttattaaggtttgactccatctctgagcatctgagtttataaagtctagttacaagcacaataaatcaatacatcttaattatttttctcaccttatctcttgtgtgcctataaatatctagagtcaattagtctctctctctccctctctaatacacacaaatcattattgattaatccatcccatcagagttaaaggggttagttgaaattctcttttaccactgaacatttgtgattctctgattcaactatcaggtagaagttctgaaacttttctcctccctattcattcacactggtttaatcattaccaacctgtatatctcggtggaactcagtttgtctgctataagcagaacccgtatgatttcagacacaagaaattgggacactacagggaaaatgttaatgtcaagcagctggcaagtattaaaaaatacaaattataaatatctatagaatatgtgaactactcacaaacctagttatatcttcccgaggtatgactcgagccttgtgaataaatgcctagaatccagctgtttttacttcatatcagactgctttatataacctgatctgtaggactagcacaataataaaccaaaacaagggctaaatgatcacaaaaatggttttcttttaccttttcctgtgttctacatcctttacaatgtgactttcaattcatctgctgaaaaggtatcgtgtatttccccatcccttgtattgggctggccttgtaacttgcttcagccaatgggatgtggtagaagtggcagcgtgcctgttctaaaccaaggccagaagaggcttaaatgcttctgctctttctcttggaactattccactgccatgtgactaagctcaggctaacctgatagagaacaagtgacatgtggcccagtcttcccatttgcccttgtcatcagcgaggccttatctgcagttgggcacagacacatgagaaagtccatctgagaccagaataactgcccaactaagcacagcataaattgctgactcacataatagtgagttaaagaaatggtgtttttaagccactaggttttgaatggtttattatttaagggaaatagtcacaagcagactaaattccaaaatgagcactatcctgagtactcccagattcatttgccttgagtcaaaccaacagaattcttattgcccattctgtgatttttctctcctcattcccatccaatcagcccatgtatgaatcatacactacctgctgcaaaactgaaagatgtgtttttccctgggaaggccatcgcttgctctccttggtgccctggaaagatacattattttggatagctagtgtaaagtacaattttgcagatgtatgagatagggagctctcgtgcttcccatgtttgtggcaagataaagagatggatggaaaaatttagtatcagtgaaaccacaagccagtgatttcaacaattttgacacttcgaattcagggttgtttttggtccaatgtgctgttctagttatacctgtctacaaaacaacaaatttaaaggtattaaacaaattcgatcctcatttattattatctcatacagtctgggtattgggtaggctcagctaaatgattctcactcagagtctctcatgaagttgcaactagacattaacagggactggagtcatcttgaagactgcctccctcacatgtctgctgggtgatgccggctgtcagccagaacacctataaaaatggtttcttcatgtaacctgggattcctcacagctgggtgtgagatggtagtgactgggtaccaaaagcaagtgttctaagacagatctagggagaaggtgcagctctttcattgcctcacgagttatatagtgacacttccactgtgccctactggttgaggcagtcacaaagatatgcccaagtccaggaaaaagagaaatagactctgcctgtcatatctatgaatgtggaaaggtcacattttaagaggagcatgtggaataaaatgtattattgcagccttctttgggaaataaaatcttccagatgtacatataaataatcggaaatcatgaaattccagtcattttacttttattaacatgcagctagaaccatgctagtgaataacttagatattagatactgtgcagccatattcaggcaggtcttaaatataactggatgcttgaaactttatctgagtcttcctaaaagtatctgggaagttaaggagaacgtttttgttggctggaagccatccttcctcatacaactaaatgatatttaatttaaaatatgaactttgccttaaatattaattagaacataaaattaaaatattggccaggcgcggtggctcatgcctgtaatcccagcactttgggagcccgaggcgggtagatcatgaggtcaggagatcgagaccatcctggctaacatggtgaaaccctgtctctactaaaaatacaaaaaattagccgggcatagtggcgggcgcctgtaatcccagctactctggaggctgaggcaggagaatggcatgaacccgggaggcggtgcttgcagtgagccgagattgtgccactgcactccagcctgggtgacagagtgagactccgtctcaaaaaaaaaaaaaaaaaaaagaaataggaacaatttttatagttgtcagcctggagcaagaaaacacaataaacttggtcagcagatgttaagacacaagtgtagggaaaaagtgaaaattttatttaaaaatatctcttaggcacttttagaagccacaaactacaacaaagctattccctcattttcttgctctggtttctaacatgtggtcactccatgtcccttgcctctggagaacgaggtggtagcatgaaaggaagaatgaatgtcacaaaagtcttcctggatttgtttcgaaaaacctaacatccattctgagagacggttaagaagggaggaagtttgtagttttcacagttccccaaattgcttaaacagagacaggaggtaaagtgaagcttctcttattcacactagaggtttaccaggattaggagaaagagataagagaaagagaaaggtatgcataacaccaggacaagggacctgcatttgtgttaaggccataaattattaggaaattcagagtttagagatcaggaaccagtattctatgctgccagtgcctggcgggggtggtgatgaagggaaggggacacagtgaccctctagagggaaaagagtatgatgggtgtcagtgtaggtatcagggaaagggacacttgaacagaagtttccttgccccaagccagacactgaagcaccacaaagtcacacgtgcctttgttcagggcaaagggcatctcacaggcaaatttatagttttgggttttaaaaattgtttctaaaaaggtatcatatcgcatatataattttatactttttaaaaaacattttgctttggagatacttaggtcattatatacagatctactctattatacctgttgcatgttatttcacagtgtatgcatgaactagggtctattctcttattaatggacatctattttttcctcaatttttctctaaaacaatgtagtagtgaatgtcctagtgttaacctccatgtaaacatgtacatttatttctctaggttaaaaaaagaaaagtgaaatccctgggtcataggggaatacacttttaaaatatacaattcagttaggcctaattatcctctgaaatgagcatggccattaatatcttaatctgaaaaatatgaggtaaattatttccccacgttctcacctgtatatttattattttaaaatatattttttaaaatgaacatgtattttaaaagcaaaagaaatagtagaaaatgttcaaatatattctccatgatagcaagaatattgcccgtcttatttttatataattagaacagtgcctggtacataatagaagatatttaatcgttattagttgaatgaatgaatgaatgaatgacaaaggcaaatggaaggaggcattgagaaaaactctctggcatgaagcataaggtaatgctagaggactttgaagccagtgttgaactgaaagtaaccatagcagcaacactgaaactcagctcagctcctggctagtttgactcaagtccccacactaacagcagagcaatttaagaggcatgtccactttcaggtataaggactctaccccagagtctactgtcctaaacggaatgtccatcattcaatcagaaattacaaaacacacaaaaatgcaagaaaaaatcccactcactgttaagagacaaattaattaacagaattagactgaaaaatggctcaatgttagaactctcagacagaggatttaaaataacaattgactgatattttaaggctctagtggaaaaagtgggcaacatgcataaaagaagaatttataggaactataagaaaaagtcaaatggaaatcttataaataaaaaccacagtcactataatgaggaaatactttgataaggtgtcagtgaactcaaaaatcaatcaatagaaactactcaaactaaaactcaaagagaaaaaaaaagatgggagataattattttttaagaattggtcatcaaaatgtagcaacaagtttgccttatcctatatcatttgaattttcaaaaaataagctcattatacaatctttaaaatattttgaatagaactgtttcatgtgttatttgtgaaaattagggaaaaagcagtaaagaaacattctgtgagaaaacctatctaataaactcagtattgaggttcttagaatatagaaaaagaaatgtggcaatttgccagttttcattataaaatggaaaagaataaaattattctttgcccatttacagaagaatttattgtattgaaagggatttttgtaaacggtaaactaagcactgtaatataagctagtaattttccagaagatacttcacccaaaagcatcagaatggacggaacatgtatctttggtaaaagtagcctgtggtttttctaatgatacagaacatctctttggagagtgtagacatatatgcttgtgtaagtgcgtgcatgtgtgcgggtacacctgtgaatatgttagttacatagcaaaggggaactaaagttgcaggtggaaattaggctgctaatcagctgaacttaatatagggagattatcttaaattatcctggtgggtccaatgtaatcactagttctaaaaagtagaagagagaagctgaagagtaggtcagagtgatgtgatatgagaacaacccaacccatcattactggtttaaggatgaggcaatagagttataaaccaagacatgcaggtgacctctaagaaatggaaaagatgagaagatgaattctcccttagatcctccagagggaacacagctctgttaacaccttgattttagccagtgagatctgtcagacttaaaacacacagaatgtaagataataaatttgtgttgcttcaagccactgaatttgcagtaatttgttataacaagcaagagaaagtgaataccccttcccgctttatacacaaagctttaataaatacccagaaaaagtgaggtcaaaatatgaaggctcaaacacaactgtgtggtaataaatattagataagattgacaattgaaatacacctgggttaatgaaaaccagtggaatatatgctaataggaaatcaaatgtggacaaacaaatcataagcttcaatgtttatttaatatgaatgagaaaaggtaatatcacctgataggttattgtagagatttgcaaatgtaacacaaaaaggtaataaatatttccaaggggaccaggctaaaaaagctgacagtatttcttaagggtcatcaattatctgaagtaggtttaagtaatcaggatattagactttatccttgcaatagacaaaaatcttcttttgcaatacacaagaaaaagaattgaaaaggagtcatggaaaggaagaaaagagtggaaggaagagaataaggaggtagaaaaggaagagaagaatcaagaagaggaggacgaggaggaggagaaagaagtagagaactcataaacatataatgatattaatgctttaaatgtgaaacctggaaccataaagcttccaaaagaaaatgtaggggaaaggcttcttgacattggtcttggcaataatgttttagatatgacactaaaagcacaggcaataaaagtaataaacaagtttatgccaaaatgaaaagcttctgcacagcataggaaacaatcagcaaaatgaagaggtagcctctgaaatgggagaatatttttgtctgtcatatatctgataaatggttaatataaaaaatatacaaggaactgctacaactcaatagcatacacacaaatagaaaacaaaattcccaaataacctgattgtaaaatggcaaaggatccgaatagacatttctcccaagaaaatataaacatgagggaaacgcaaatcaaaaccacaaagagataccacctcacacctgttaggaaggcaatcatagattaaaaaaaggtaagtgttagttaagtgttagtgaggatttggcagaaagggaacccttgtacactgttggtgggagtataaattgatacaaccattatggaaaacagcatggagagttctaacaaattaaaaatagatttaccacctgatccagcaaacccacttctgggtatacatccaaaagaattgaaattcggatctggaagaaatatctgcactgccttgttcattgcagcattgttcacagtagccaagatatgtaaacaacctaaacattcatggatagatgagtggataaagaaaatgtggtgtatacatacaatagaagattattcggccttaaaaaagaaggaaatcatgccatttgtgacaaccttgatagacccgaatagcattatgctgggtgaaataagccagaaatagaaagatactgtatgatctcacttatatatggaacctaaaatagtcaaactcatagagcagagagtagaatggtggttaccaggaaaggagaaaatggaaaagtgatgattagagggtacaaagttttagttacacaagataaataagctctgaagatctattatacagtataatgcttatagctaacaatactgtattatatacttgaagtgtgtacaataagagggtagatcttatgttgagtgttcttaccacacacatacacatattaacaattttaataataaaggaggtgggagaaaactttaggagatgatgcatatatttatggtcttgatgatagtgatggttctatgggtatatacttctcaaactcatggaattgtatactttaaatatgtgcagctttttatatgtaaattgtatctcagtagagtggtttaaaaaatatatatatataaagatgttttcctatctggaaataatgtaaatatgttgagttgggacattagagcatggtaagagaaatgaaagaaggacaactcagtgaatggctttgcatccagcagaaaagtcacctagtacgaactgaagcctctactatgtattcaaagtaccttccatgggagttcacccttccacattttccttctgtcccaaccctgcctctaagtctctctctgagaatattattcaaattagtccttatataaaagttcttagtcctctgagtgtcccagcgggagggcattatgtagattttctcaagttaacaaatagtatagttaatcaggatgaaacatttcaaaataaagagtacatcaatacttaggaagcatggatattgtgtcaggcactgtgttaaggagttgaaatattaagtgcatcatctcacttaacctcttcatcttcatgtgatagctataaatatcctggttaggaaacagtctcaaagagttaagcatcttgctcaaggtcacacagctaacaactggcaaaagaaagaacactacttttcagagaagcactattgcagggtattgcttgatatttaagtataggagagtgcgccgtccatgaaggagggcttggaaatcaatagtcctcactagaaattttagtgtgctgcctgcctgtcttcaggtccataaagaacaaattagagaattttaccctataccctaacttttagtcaaaatcatccaggattgcaattaggatgcagtctttatggctccccaagaaggaatagagaaggtggaaataagttggtaaaattggaagaaaaaaaaaaaaaacaggaagcatttacataaaaacaactcttttaaagaatcaataaagttacagacattaaggtgaaagcaaactaaagagattgaacttggagagtggagggcaggtacaaaatgaatgctcaggaagtggaaaaagtcaaagacaaatatttagcacagtatgatgccaagaaaggtgaatatccagttaaggtaggaaccagggctgaggggcaaaaacaaagatattggagcctactggttgtcaattagctcaaagcacacttcccacctcttcaaataaaaacaaaagaatctgagcttttcagagctctgccttgagaccaacagccctagggctaaatatcaaatatcacatgcaaatgttgtgtgcctgagagcatgcacaaccatttactcattccatttcataacacatattgagcatttactgtgttccaagcactgttagcaacacagatgacttacaagagagtaagttacagctgagaggccagtgaaggcagacttgtagactgaaactttcaggagccatggaagagttagtgctgcaaaatacgtacagtgttgtggggagcagggagaatatttaatgtcttcacaaaaagggaaacatttgagttggatctcaaaggatacatggaagttcaccagaaaggaataaaggaaagaataacattttaggtagtaatcctatatctgggcatatatactaaaaaagtagtttttaaatcaatgaataaggatacttaaagaaaacttattctgaggttaaaatctgaaaataatcagcatgttcaaccactaaagaatagttaagaaaattgtattatattgacttaattgtcttttcaactatttttgacctataaatggcaatttcacatcatttaatagaatttcagtctaatgaaacttattccgataaaaatgggagaaaatctgggaagactatgttgaaattaaagaatccataaaataatggcagataaaatacaaagaacaaaatttctatgtgtaatataaattgaagtttgtaaaatatgtttccatagtgataaagattgaaaagaaaagagggaaatgagagtagttgtaatagaatagaaggagttaacatatcaaaaatccattcacgttttttaaatatatatatagtatgtatatacaaacgtatatatgtatgtgtgtatacatacaatatagaaaaatacatattttaaaaatatattttatttatatgtatttatttaaaatatatatttaaaatatattttttctatattgtatgtatgtatacacacatatgcatacatacacacatttaaaatatgaaccaagatgatattaagttacattcaaaatcttttaaaagtagcttatctaaaacattccattttatctaagtctgagagaaacaggttaaccattttttcagtggaaaaataagctcattgatttcatttttaaatagaaatatcaaatggcagccagctgaaggagtaatttgtgtgctatgaagcattgggttctgggaaggagaagtcccagaacacttatttattcctgctgctgtcacagtatttgagtccaagatccaatatgcttaattataccagacatgattttgaaattcttgtgttgaagatttgggggatacctagtttttctgtatcttgggtctctgtgtctttgacaagaggttcagaatgtgttacctcttctggactgatttctatctgactgacacacggcaagggtctaggtaaaggcatcaattttatatggtataggatccagtagagatttgccatgttcacatattcagaactatattataacagactgctgagtgtaacataggcacctatatacatgggggcatctaagggtatctgctagagttgtatcagttaggacaacttaggtaattctccaataacaaacagctccccagtctcagaggcttaaaatgacaagagtatactccttgttcttgttacatggacagtagagcttggcataagagtttctcttcattgtagcaactcaagaaataaggctaacagagcagccactatctcgaacattggcagtcaccattctagagagaaaacagcactctagagggtctttcatggtctggaagtgattcattactcataactcacttgccagtcacaagcccctgccaatcataagggcccaggaaatgcgttcctaccgtgtgtacagaagggagaaaactaggaatacttgacaaacatcattaatcactaccacaagactctttctgtattgcttatttttaatggaagcataaaatattgaaatgcaattttttttttttttttttttttttttttttttttttttttttttttttttgagacggagtctcgctctgtcgcccaggctggagtgcagtggcgggatctcggctcactgcaagctccgcctcccgggttcacgccattctcctgcctcagcctcccaagtagctgggactacaggcgcccgccactacgcccggctaattttttgtatttttagtagagacggggtttcaccgttatagccgggatggtctcgatctcctgacctcgtgatccgcccgcctcggcctcccaaagtgctgggattacaggcgtgagccaccgcgcccggcctgaaatgcaattttaagagtgccttcaaatgccatctcagagagatgatctgcagggccacagggcatcaacaatcaagaagagttctaaaggaggccaacaccattttaagagactggttggtctggtggataacggaagactggaagagttaaatacgtatagtttagctgggcagacccagtagggagcaatagaaggtggtaaatgtggatgtggtagcaatctaaaaatatccataagatgtaaaggattagaaggaagtattatttagcatgcaaatcagaaagaatcactagatattttaaagaatgatatgaggaattaggttctgagatcaaaaaattggaaaactgatattataaataaagtgaaaaagaaagcattctcaaatactttttacttgagaagatgggaaaaaaaattctttggataagaattgaaaatggggttaactttagggagacatctaagagcacctgaaataaatctgacctctcgcattcacacacaagatttatatttgctagctaaattctagcgtgagggagcaggatacaggcagatacatcctcttgataacatttagagcaatggaagttttagtatgtcatggagtactttacaaggaccctgccatctattccagtatgggaagattccagaacctgcctatatatatatgtaagtaagtccaagcttgtgccacttgccacctggcagccagtaagtcgagagacaaggtgttggaacaaagaaggtgactttattccagagagccagcaaaccaagaggatggtggacttatatcctaaagaactatctgaaaagacatgactctcaagcttctttttatactggggaaaggggaacaaacaaggggttgcgatcaggaggcaaccagtgaccacagacatctgggtatcagcagaggggtccagagattttgcagaacttctttgtctttggttagttcacagtgttcctataaatctttagcataacattgctacttgtgtgtacaccctccttatatactcaggagttggttttgggaagggactattatccttgctttaaagttgaattataaactaagttcttcccatagttagcttggcctatgtgcaggggtgagcaaaggcagttagctcgtgaggttagaggcaagatggagtcagctgttagatttctctgttacatatagaatacttggagtatggaaaaagatcctaaaacccactgtaattatagctacttaattatatgtgcttctatgagcattttaaagacttttccaagtttaggacaataggttttaatatgtccagggctaagactgatactcagatactgatgagtttttctcaaaccttccatgctatcatggggagtgtttcataggcaatggaatttagttttatatcttctttttattgttgttactttccttgactgtgttttctcccatcagagacttgcctgactcattttgaaaagtttaaaatgggaatttttggatggatttaacatgagaagagatcaatcatttacttttcctagcttgtttttcaaacaggaaatacgagcagttttcttctcagatgaaaactgcagttttctgagttagattcgaatccccaccacttttaggattgaaacggaatcaactcactttagaacaagatacaactaaactgacctgagatcttctcatttctaacagtaactacaagtaagagaagagccaacaaggacaaagcaaatgagcttaacacccagggattttctctagtcactcaaagccagagggagtgatttgcattatgtaattttttactgacctctttgtccacactatttcccaggaagaaatataccttcctaaatgccaacttctacccctaccctataatgtcagcctaccccatacctacaccatgacccaaggtctatgattataccgtctttttaaaaatcaactttattggggtatattttacatacagtaaactgcacccacttaaagtgtatattttgatgtgttttgacaaatgtgtatacttgtatagctaccatcaaaattaagacatagaacagctttaacttttcttcaggaagaagtgtttctgctgtttttgaagacttacatttgcctaatgtgggcgtaaagggcattttcagcacacatcagcaatgttgggaaaggatgaggaggtgcaaatactttggttcactacatgtggaaaggtcacaagcactatggaaaaaagagaaagcaaagcagggttgggggaaactggagtgtgggagtgggagtgtagccgtgatgtgcagtttgcgatattaaatgaatagtcagggaaggctttattgcgaaggtaaggcttaaaggagaggagggagttaccaaggctgctatgaaggggttgggagcagggagagttctaggcaaaggaaacaacggaaggccctaaagcggaatatatctgttatattcaagaaacagcaaggaagtctatgtggctcaaatgcagtaaatgaggggtgaatagtaggacaggaggtcagagaagttagcaaggagtcaaaacatgttgggccaagacagccattggagggctttggtgatccttgtttttccaccctgtcctatggagatgtggatgaaggaaagcctgagggaaaaagaagagtggtaggtacgtattagccttggtccaagatgcaaaaagatagagtggcaaaggccagcaagggaaaaatgattgaaaagtgcaggccagaacaacacagaaattcctggaaagaagccagggggcccacgaaacataaaatgatgttactgatgttcatggcagaagttacagagagacgtattctcttgaatgactgaaaagggatacagaaaagtcttgtcctaaccttcttgaataagcaacattttaccacctctcctaaatgaaaagagtataaataaaagaaacaccacctactcacatctgaaaggttgccaactcttgttttgtaagaatctcaggatctcttaagcaaggggctgcatttcagtatttaaaaagtgcaccttgtggcttggtgcaatttcaaccacttaggtctcataagcttttgagccacagctcaattttcaaaggaacaccctaaatccggttttttaaatggtcatctgatgagtcaatcaacaggtgtaaatttttcaatgccttactgtcagtgtcaagaaattggttttttttgggaaaacacaaaactgctttattagttgagtatataaaaacaccacaggatttatgttcttccctcaacacatgcttgggtaactcccattaggagcagcaggagttgcaacagcccatacagggaaaaatagaagcttcacagcgtaaggctacaaaatgcagcagagacatccagtggagtcatcttaacattataggatctgcttgtctgtgccttagtttctccatgtcactaataggtgtgaatttttgtgctcttctgttcaaaaggtataggataaagactaattaaaggccaatactcatagctgcaaatgcattgaccttgtgtaggtgcccagcattatttaaattctcactactcaaagtgtggtccatggaacagcagcatcaacatcaactgggaggctgtcaaaaatgaaaaaccttagactctatgcctaacctgttgaatcagaatctatattttagcaagatctctatcttgcatattaaagtttgagaaacaagaagcacaatgtttttgtttaaaacctgattgaatctttgtgctaactccatgtagtagataataacatccccattttaggaagttgttgagattgaatcctgacatgacctgccataaattaagtaagtggtaaaaccaggattcaggctgggtgtggtggctcatgcctgtaatcccagcactttgggaggctgaggcaggcagatcacgaggtcaagggtttaagaccagcctggccgacatggtgaaaccccatctctactaaaaatacaaaaattagccaggtgtactggtgggcacctgtaaactcagctacttgggaggctgaggcagaagaatcacttgaacccaggagatggaggttgcagtgagcgaagattgtgccactgtacttcagcctgggtgacagagcaagactccatctcaaaacaaaaaaacacaaacaaaccaggcttcagactcaggagggtatgtgattccaaaagatatacgattccaaaagtatacatccagtaatacttcactactcatgatacatgtgatcaagagaacaaaactgagggaagaaatagaggaaatcactctgctttatctcaacataattttcaaaataaaagaggccaccattagcatgtaaaaggaaaagccatttggatgaataagagaacaatttgatctcaatataggctagacttagtaggagaaaatgtaattaaggaggacaaataagtcttacagaagatcacaaaccaagacccttccccagtatgcattttacagtaaagggacacccacattcacacagacacacacagatacacacacacacacacacacacacacacacacgcacagtttccttaaaaccaaatcctgcttggcatgaatatgtataattagatgttccctaggagtgagaagtagtaattaattcagtgttaaacatcacaatctattacttgaactccatagcaaccacggttgccaacagagagaaaacaaaatttcggagcctatttttaaataattacattgaaatttttgaaaatgtgtaaaagctgacacttgctatttttaggctaaaacaataggcattaacacaggaagtagagaagaatgccaaggaataaaggcaaaaggaaatctcctctgaaccaacctaaacaatgatgtggaaagtatgactttgaccctgcccaaagcgcagggcccagctgctccctctggggaagaaagttgttctttcagactaagaagagatatattaataatttctggaaggaattgacttttggaatcaaaccaaactacatttgagtcccagtgttgtcacttcatgtgtttccttagacaagttgcttacgtccctgaatctcaattccctcatttgttacaatgggaaaaatattaggtctatctcagaattttcctaaaacaatccaatataaaatgcccaatacaaggtgttgtagattgggttcccctgaaagcagattctgagtttagcattcaggatatttattgaggaatgcccttcggactaacatctgtgggaggaaagggaaacaagcaaggttgggcagtaggagaagttgtgctgtgatgacagcccagtgacagccttgcctaatctcttgggaagttctggagctatcatggcctgacagagctgtctgacagtgggctgaaatggccaggacatttatcacaccttaatccaacagccaataaatgtggctgctcacagaaggacatgatcgttggtgagggggctctctgcagctgaggcagtccttgcaggggctgccagttaaccgcattctcagcagctgggcaacaagtcctttgcagggggacctgagtgctgcatttctatatgcaacacatactatgcaaataatgtttgctttacttattttgcatttgcaattattacaaacatctctttctaatagaagttctggtatccagaaaaatcccattgtaatgcatatcataacaatttctgttcttaaaaataactttcagtattttgttaagttctgatcccagaaacacacactcatctcttttaaatttctcagtatttctatgaggtagtgagtattcatctccactgtacagttgaagaaacaagtgcagagagtaactagaaataaccagttctggtgagcagttgagggtgaagaatgctatattggacaggttttaaatgatacttcttgccacaccattcctatgcctgtccaacatcaactcaatccatcaacaagtaaacaacagaggtctcaagggaactgtgttccctttctttccattttttggaaagacatatcttgccaactcacttaacctttatgccaaaatcttcccacattttacagggtaatcaacacatgtctcatatttgccccagaaaactgaaggaggaggaggaggttggcttacaggatctccagagcccgtttcattttaagaattctccactgataatccaacgttttcattgataaagagtaatgtattttgaggcaagcttaaaatgaaggcctagataagttagaatttcttggttgcaagcaatagaaactagctttggctaacttacagaaaaggacatttgttagagaatactgggaatttagagagaatccacagaaggctggggaaatgagtttggcaactggacggacccctgaaaggctaagaaacaggaagccagcaatctccctattgtgagaattctggacagatgctgtcccttctgctgatgtagctgctgcgatgtgtgacttccaaatattccttccagccttcattattcattcaagatgaaaggcctggagaaaatattttttcagactggctgccacagctatatcaggaacaggacagaaagggtgtggtgtgttggtttccactgtagatgagagcacatggaatttttctcccatcaagactacacaaactggggagtaattcctttcacaaaaggaaatgagggtgtattagaaaggaggaacatagctgtgcacgacaatgtaaatttccacacatataactgcagtttactcatttattcttatgcccacaaatcaaatcatcttactttttgtagtcttatgctgtccaaatcccttcctgcttcccagacctctgagtctcctcaggggtccttatgcctcccatttatatttgataaactcctttgaacaataggaaaacttgacaaaatccaccccgaataattcttcaagggactctctattcctaattaccagtagcagtgtaatgttaaataccacttccaggaagtaagaaggaattggtaaacacttcagtaatcttgggagattgcttacatatactcctaataaccaaggtagagaaaaaaattaattcttatatttggtaaattcagtgcaactggatttacaaaacagagtaaaaggcaataaagctaacgcaagggccaactgtgtacaataaaattttttttcaagtttgaaactaaattacatagagttttaaatcttcagcctacaacaaaagctatttggtcattttgagaccagactgcttttataggatttgaaatttggttctttgtcaaaaaatcccaaagagaaatttgtatgtgttccctaactcagtttcccttattctcagattagcatagactgactaaccctagccttcactcaaatgaaccactttccaaagtaatgaatgaacaagggttagaaaataaccattttctcttttttctcctttcacattcaccccaatttcatatccatatataattcagatttcattaatttaacaaggagaagataatctgatcataagtttgctattttgctctcaaagttgatgctcttgtctgctttggaaagttgtctagcttttgtacctatacagggaaccaaatgcccagacacaattttacagagtcagcaggtacttagcttgcataaaagtatatatatccagttcactgtctcactcttgcagccacagaataatccatatactagagaccatttgggaagtattcctgtttcatatatttaaacttgtttgttttttaagtactttccttatttctcagcaaggaggcagaaataagtggcaatgtacacttctttcctttttattttatttatttatttattttctagatggaatcttgctctgtcacccaggctggagtgcagtggtgcgatctcggctcacctgcaacctctgtctcctgggttcaagcgattctcttgcttcagcctcccaagtagctgggactacaggcatgtgccaccacacccagctaattttttgtattttttaatagagacagggtttcaccgtgttagccaggctggtctcaatctcctgacctcgtgatctgcctgcctcagcctcccaaagtgctgggattacaggcatgagccactgcgcccggtctgtacacttaacttcttatcacaagtttttttatgcaggaaaaagaggaaggaaactaatatttattgaaagtatactatgtgccatgcattgtgctagatgcttcacatactattcagtcctcattgcaagcttgcaggttgtagttacagattgctgggcaattttcaccgaatgaatgtgtggaaaggttagcaaattgcccaaggtcccctgtatttgacactgactgcaacgctcttgagccttccatgatagaaatgccagcaaggcacaagcttggcaatgtcacagttcagaaatcagcctcttggagactgtcacatcccatcaccacaagttgatgggattgaaatgtgccatatgttctgaatatagacagggtcagaactttcattttcactgagtgtgcggtaattaaaaaccttactgaaagcaaatgatggaggatgagctttagaacatctctgaagcaacttctaatgaatgcaaaaataactggagttgcaaagtcacattgcaaccaccctctccttaaaggttaggtatgaaggccaagttgccttcatcagccacattgcaaaatatttaaagataagcatacgctacagagtttaaatgaccatatatcaaaacaatattgttttcagtctaatattaagtgtagcaagccagatgtttcttatcttatttaaatgaaaaaaatggagctactagtatgcacattaaaacttgtaaccagattgtaagatttgggtacaaccaatatttcataattctttgcagctcctttaacacccagcaagagattacaatgaattcttgttaaatgaatgaatgaatgagggcttgtttcttgattcagagggcagaatacagaatctaacaaagaatctttaacatactaaacactcaggaaataaaaacactgatctagaagacagaaaatctaaaagctaatgagttgaacaagtcttttaaactttctagtctgtagtactttatataaataaagtgtgagatacaattctttatataaataaagaaaggtgtgagaagccccatctaacactgtgattccatgattctatgaaatcataacccagttatccagatgaaacttgatctctgatatctttcttgttatctgattacacaggaattgggcaaaaatgtggcttaaaaagaaatacagaactcaaagattaaaaaagaactatccatatctaactatccatgcccagcttaccaggggactcgagtatataatcaagacggaattttttatggtacatcagcaacctttgaaaatacaacatgatgaaaatacagcatgacctggtgcctagccttatccttttattgaatatggagggaaagagggtgggactgcagaggttaagaccagtcggcggtctattggtcttttaatgtttctgggtctcagttttattcatatttaagcaagtaagcctgtgtagacttctctcagaggaaaatcagcaagttgtataaatgaaagcagattaagcatatgaatcctttcaggagaaaagttagttggggtgtctgttgttttgtatgaatctgaactaggaaagtcagacaaactagagaaggataaaaagtgtccttctgcttgctgctggagtaccttggatcaggggagtacctttggatggaggcttggagtggacagcaaattggggagcaggaagcaaaatgggcttgatattcctgaacattcctcatagcagcatggaatcttgaagtcttaaaggaactactcaagtgggacctctagtcctgttctcataaaatgtgatacttgaacttccaccatcaatggagtagaaatgagttgattgattttgcaaaagcaggaccctttgaaggacctaagagcttcagagcccgacaagggatctactgggagattccttagcagcttttggtgtcatagtaataaattttccaaatgaaagtaatagtgagaaacggggtccatatgagcagtttttgcagaaaatccttacagtgagcctcagagcagcaaataaaaaaagtggtaatttctggccgggcgcagtagctcaggcctgtaatcctagcactttgtggggctgaggtgggtggatcatgaggtcaggagttcaagaccagcctgaccaacatggtaaaaccctgtctctactaaaaatacaaaaattagctgggtgtggtgttgtgtctgtaattccagttactcaagaggctgaggcaggggaatcacttgaacttgggaggcagaggttgcagtgagctgatatcatgccgctgcacactccagcctgggaaacagagcgagactccgtcaaaaaaaaaaaaaaaacattggtaacttctgtcagtaaccatcttttgatgaagaacaacacaaatgattaaagatacaaactattccacatgaagacagttgggtaaatagaaaaagagaagggtcgaggatcatttcaaactgaaaaagatttgagccagagttaaagaaagttagaatgggctgaaatgaaatttataaaagccttatttttttctgtacagataagggccaggagacaagatcaggtattctaactctgttcagtgatttctgaacattctgagttgcctccccacctcagagctttaataagccttcttttcatccattctctcataccacacaggtcagaataaaaggaaaacagcaagacagagttggaagtaattttccacattcatagaaaaatttccaagcagcgtttatattctatatgcccttgggtctttataggcccccttttggataagcttccttatatcaggtcactcagaatttagaggggttaagtaaatgaagaaattgatgtcacttgctctttaagctaacattctttcctaaacctcatcataaacattgtcttccttcaataggaccatttgttgagctcttcagagcacccctcaccctgtaaatgtagacacatagatgtactgtatattctaaaacatcaggacttctggatgtctttttcttttttctttttttgttttttgaaacagagtctcactgtgtcacccaggctggagtgcagtagtgcagtttggctcactgcatcccctccacccaccagactcaagcaatccacctcagcctcctcagtagctgggaccacaggtgcttgccaccatgcctggttaattaaaaaaaaaattttctttgtaaagatggggtctcactatattgcccaggctgctctcaaactcctaggctcaagcaatcctcctgcctcagcctgtcaaaatgttgagagtacaggcatgagcccctgggcctgaccaggatgtctttttcttagtcatcagaatccaatgagctctgtgtcttcacagacagcccaagttgtttttttgtttgtttgtttgttcgctttttctcgctgttaattccctatcttccctattctttggagattgctctattttgaagttcttacgtgtattatagctcttcttcaaaggaacaaatttgaattaccctcagaaatcctcttataggattcagaaaagatgcatttaaaacttcagtctcaggtcaggcacagtggcttatgtctgtaataccaacattttggtaggctgaggtgagaggatcacttgaagccaagagtttgagactaacctgggcaatatagcaagaccccatttctactaaaaataattttttaaaattagccaggtgtggtggtggacacctgtactgctagccacttgggagcctgaggtgagaggatcacttgagcccaggaatttgaggttgcagtgagcttctgtgattgcatcactgcactccatcctgggtgacagtaagacctgactctaaaaacaaaacaaaacaaaaaaaaacaaaacaaaacaacttcagtctcagagacaggtactatttgagagaagaataatgcctcagaggattatcactttaaataaaacaccattaagccctttcagcccagttctcaattgcttttatgcccaaccaaagacaccaaataatctaaaatgtgttctggtatgaaatcagactttgcattgtaaaaatgagccatttattccaaagtttctttagccttgccagtaatgaaaagctgcctcactgcacacatgactttaatgtacatctattcaggagtgaagcaagactgtggtaaactaggtagacatggtaattcatggctactcatgggcagccagtctcatggactcacctgcagtggtagcctcttgccttatttcacttgtatttgttgaagaaaagcagcaacggacaaataagatatagctgctagcacagcaagatgtgaaacattttatgacctaaacacaataacccataatgcaaaaaacctgcaaaatagagcagagtgaatcaaattcactagagaattcctttatttttaccacaatggctgttatgctttagaatacttacttccaatcttggcccttaattatatcataagaaaaggtcaacacctttgggtgttgggatggaaatgtaggaaagtatgctttttaagttgaatttgtaatagaaacaaatgaaaaactaataagaaaaaaatgagagaattaaacatggagcagatccagatggggcaagacataaatatagagcagtttcaaagcaaaccttgcaagataccagtctggtaccttgtatgattttcctaggctgaggacctgacagattcttaaaaaataccttgtgacatgcattatgctcttcacaaagagcatatctgagctcttcacgaggttcctgcaaagagctcatatttcaatgagggagaaagaaacagaagaaacaatttaaaataccctaatgtgataagtcatatatatggcagtagcatccctattgtctagaaaaagccactataacattgtattgcttagagtctaaatttatttaatgtaattttctgattgctcaatacttaaattttattcccctcactgctcttttttcattgagagtctaatttacctataataaaaggcacagattttaagagcacagttcaatgagttttggcaaatgtatatactcatctaatcaatactataatcaagatatagaatattttcatcaaccaagaaagtgtctccctaatttataacaccttagcttagttttggttatttttggttcatgtaaatagaatcatacagtatgtaccttttaatatttgactcccatcagtcaaaaaattgtctacaaaattaatccatgctattataagcattggattttttctttttattgctgagtgttgccccgttgtatgaatataccaccatttgtccatccattctcaagtggaatgcaatttaaattatttctggtttgagctgctgcaaagaaagttgctctgaacaatgttgtgtaagtcattgggtggttatatttctttctcttggatgaatatttagaaggggaactgttgagttcacacattgtattcttgaactcttattttgacttatttcttgatgatcatagccacttgggagcctgaggtgagaggatcacttgagcccaggaatttgaggctgcagtgagcttctgtgattgcatcactgccctccatcctgggtgacagtaagacctgactctaaaaacaaaacaaaacaaaaaaacaaaacaacttcagtctcagagacaggtactatttgagagaagaatctttgaacactgtattagtctgttttcatactgctgataaagacatacctgagactgggcaatttacaaaagaaagaggtttattggacttaaggttccacatagcaggggaggccgcacaatcgtgatggaaggtgaggaggagcaagtcacgtcttacatggatggcagcaggcaaagagagagcttgtgcagggaaactcctgtttttaaaaccatcagatcttgtgagactcattcactatcacaagaatggaaaggccttcccccataactcaatcacctcccatcgagttcctcccatgacatgtgggaatactgggagatacaattcaggatgacatttgggtggggacacagcaaaccacttcaaatacttttgctgaagtttggttaatggtatgtttcttgagaaatggtgtattttttgagaacttatatagaatatctttgttttctatgtacacaaataatatacatttgaaacccatctctttcttcctcattcactagtaatgtcacagctctaaacataccttatcatcattcaccttgaggtagggacagtatctttataccattatgatcccagtgcctggcacatggccgaaggttagtaaatacttgtcaaataaaatgtgtgcctctgctgaatcacccaaactgatatttcattggtgcaatttagttactatcttttatctgcaacccaatctcatcagcatatgattacttaaaaaaacaacaaatcaaggagcaaagaccccagtgggacactgcttaacaaatgttgatgatactaagctagaataaatcagaagtgacaactcttcacaagaggatggggaaacattggttggattaagcatcatttgtttttgagataccttcatacacatcactgttcatattatacttcatacacatcaggactgtttactagcagaacaccgagttgcatttcaattaagtcattagtgatgggttttagagatgaaaattaacaagatcctatgtttatacaaatacacacatacacaaacaccttcaaaagtcaacactatggaagattctagcaagaagtggtggtcataattcggatctacctggtcatagaggcaaagcccacacactttacatatttttcttcttatattaacctttttgagcttagaagattgcattaaaatctggatgcccaacagccaaatacctagtgtgaatttatccctgtgctacagtgacagtgattcaccctccaatgctccatcctgcactgtcctcttgttcttacacactccatatccaattcatccagaaattgtttatctataaaatatatccagaatatgatgacttttctccacctccaccttggtccaagttactctcatctcttgcctgtattattataatgtccttctatcttgtcccccagctttcattcttatttctcttctggcaaccagctgacagggtgaatcttttaaaagataagatagatcattgttattctatctcctttctgacacttcacctcccaccattccactcctttacaccctacactacaactactcaggtctccttgatattttttgaacttctcccttgggactgtgcttgtactttcctctacctactcttactggcgagagactcttcaagtctttgtcttaatgtcaccttcaatgaagcctgctcagacaaccctaatcacaaccctaatctcaacactctcctgccttccaatctttcttatttcgaatcagctattacattctttttactacttattattatatattatttattgtttctcttttccaattagttctacaaaggcaagcttcataaaatcatgtctattttgttcactgatacatcccaggtgtccaatgcttagcatatagtaggtactgaataaatatttattgaagaagtcaataaatttgcattagatgcttttggtacaaggtaccagataaaaggtaaaaaggtacaaggtacaaagatacaaggaaagtcttccctgaggttaacttcagtatggaaactttagaaaatatatttaaatatactgttagaataattgttctaggtcaatttttgaattttacctgtaggactccaggtaaaagttattttacctaggagtggaggactgtttttaaactacaatttttctaggtagttcatctagtatataacattgctaaaaatccttcaaaatggaaacaataagcttttctttatggtgcaagaaaaacattgtcatgttctgggatcaatattttaaaaattcagttgtctatggcacagaatgaatattgagaaattttagaggaaattacacatcatattattcaagcattgacattattttaagaatttctagcatcacatctaaaacaaaatatgtgcttcccacacatcagtctttcaaatgtcaccattacttatatttagatgctgttttttctttaaattgacacattaaaattaaatatatctaaacactggagctttgtattactactactgatggaaaatcagtatcacttagcacaaatagatgagaaaaatcaaaatacaaattatgaaaactaaaaaatttattaaattctagcaaggtactattgctggcctaatgttctgagtctgaagtctttctcttctatgttgaaaatgaagaacacaaaaatgttaaaagatacagaaacatacgctgtaatataaaactaaaattttcttttatacattatcaggataaaaaattttaagggataactgtctcattttgagtttcaatatatccagatttcatgtttaacatcatctcttgtgtcactagtgtccgagggtggttagtgcggactttgtcattcaatatttggatttcaatgctgacctcctcacttactgactctgcagccttgagctagggaaataatctctctaagttgtattttctttcatccataaaatagagcaaatagtgccgattttgctgatatgagatatgacagttaaataatataatgtacaaaggcacaaaccaggtgttttaaatgttaattcccttcttggtcaaaaagattcttagcttttagttttaatgaccaaaatactctctgttcattcaggtcaacatgagttctcattgtcaggggttcaaagttctatctaatgggcttatagcttatactttgtaattgacattaatattaaaatgtcattatagctttagaggcgtttgttatagaagtcttatatagcaagtattatagattgattgtaaactcccaaaactcatatgttgaaatcctaatccttaatttgatgaagatgggaaggaatgaggaaaacctgtcagatttattggctttcacaggagaaccatagaattagtgctctattcttcaagataatagaagagtgaacacaaaggagagtcagagatcatctacctcatggtttcaaaagtgggggaccattgcctttctttcaaggactagacagagtctctgccagaactttgcaggtgggactgccaggcagtctcctggtgacacactcagtgggcctgaaggtcaagacatcaagccagagagggttactcttgagccttaaaatctcatggattttaccttgcagtatggacttacttgggatccattattcttttcttctttcttatttcttccttttggaatggaaatgtctatcctacatctgtcccactattgtattttggaagcacataccttgttggatttcacagattcacagatggagagcaatttgcctcaggataaactgtaccttcagtctcacccatatatgatttagatgacatttaaatgagactttagattttagactttagagttgatgctggaaagagttgagacttttgtggctgttaggatgtaatgaatgtattttgcatgagaagtacacaaattttggaggaccaggggcagaatgctatagactgactgctatagactgttacgctcagtcaaaatttgtatattgaaatcctaatcctcaatgtgatagtattaggaagtgaggccattggtaggtgatttatgagagcagagccctcatgagtaggatcagtgcctataaaagagaccccagagccttgtatctatagccacgtgaggacatagcaagaaagtgctgtctatgaatcaggaagtacaccatcactagacaccaaatctgctgacaccttgaccttagattttccagtccctagaactgtgagaaataagtttatgttgtttattagccacccagtttataatattttgttatagcagcccaaatagattaagacagcaagcccagccagttttgaatggagaataactggaaatgatagggataagtgagagttctttggaaacaggataatctctcaatatctacagctaagcattccatttatatcagaagagggctggcccaaagtatcatgatataaaatctgcttggggctgggaggagtgatccatgcctgtaatcccagaactttgggaagcccaggcaggcggatcacttgagcccaggagtttgagacaagccttggcagcacagtgaaactccacctctactaaaaaatacaaaaattagcttgggtgtggtggcatgtgcctgtagttccagctactggtcagggggctgaggcaggagaatcacctgagcccaggaggtcaaggctacagtgagccatgactgtgccactgcactcaactctgggtgatggagcgaaaccttgtctcaaaataataaaataaaatctgcttggactgacttgctcaaggacaattcctcaaaactggagaaatttgcaaaggtcaccaccaactcatcaagaacatctcacattttcagttatcttgtgtatcccacatttcatggtgcttccgtcttccactgtgcgagccacatatagtgctgcaagaggaaattgacatttggggcatatttcccccttctgtacaaaagccagagcaattgagggtgaagatatgtctttatatttatatagctattaaagtggttagttaaaattatttgaataattcaaaaaattaagcaggaaagcatgaaatatctgcaaactgagaaagatacaatcacttatttatggaacaccaattttaattttatattttgaaaagatggcaataaatatttatatgtttctcatttttttaaacacaaaagccagggaggaaaatgcagactacagtgaaagcttgtggtttaaattccctttttagattttataataacctttatcttcctgaattttcttcctttattagtattatggaacagccagacttaattatctccttttaatttgtgtttcttatttcttttgtttggctcatacacttgtttattcctttagatgtggattggtgagggaggggtagaagagtgaacacaaggagattctatgtcaccttttataagagaagttagactttattttcttatttaaatttcaatagatgatttgttaggcttaaagctgtgggtggtgaagaaattcttctttgaagaaaaagcgtattcattcagtaattatatgtgttagtaaagaatcactaagtaaacaagagttccaggacaatcaataactatttggagagaaaaaaaaatcaagttaccacaacttttcacaaaaaaataaaaatcaattcaagatagattatgatttaaaggtaaaacaaatacataaaactaaagtcttaactgattgcttatctgatcttaggaggtaaaaagaagaaatcacagtagaaaaaaactatagatttatgcaaaataatgaaaacaaaaagaaaacctggagaaattacttgacagaaaatacagttactgtaaacaggtagtgtataaagtaaatatataaagttttggtattaaataataagaacaacatctaggtctcatttgaaattggccaaaggacatgagtaagtaattaagacaggaaataaaaattaatgacaaacatagaaaacaaattctatctcactagtaataaaaatagaatgatagcttcaagttccagtcaggatggaataagcacattccaccctacttctgctaatttcaacaaacaccctggatacacttaaagcacttatccagaagattttgaaagatggattcaaaaagatggttgggctagtgatgaaggaagccttgactgtgagttccctatatatttttgtctcatctatatcttggtttgtgtgctagagaagccagcaactcagaccacaaaagggtacagaataaaaaggcccaggggccaggtgcggaggctcaagcctgtaatcccagcactttggaaggccaaggtgggcagatcagctgaggtcaggagtttgagaccattctggccaacgtggtgaaataccatctctactaaaaatacaaaaattagctgggcatggtggggcgtgcctgtattctcagctactctggaggctgaggcaggagaatcgcttgaacctaggaagtagagattgcagtgagccaagttcgtgccactgcactccagcctgggcaacagagaaagactccatctcaaaaaaaaaaagtcccaggaaaaacctgtttcctccattcagaggactgacaagaaggaggctttgtaagacagaagccttttaccctacctgccctaataataccaccaaggacgcagttcccttctcactccccaccagcctatctgtgacatataggtagggatgccccttttttgcctctccccaataagtgtactttccaaagggtctgtgcaatggagccctattaacctaccccttcctgaggtggcacatgtcaatgaagaggtggtgactctcctcctccccaagcatggctgctgcagatagagtagagtggagctctgtagaactaccccagtccctcactaagcaaaggtaagcaaaggcagcatctctctaccttcccccattcccacagttggagaggattactaagaagagagaggtaggaaaggaatcttttcaatctttgtatgaagtcctaggcttaccctgaagtgacctatgcaggaaactgaccacaatcaacacagcaaaaactttgagaactgaatgaattatggcatgaaatatcacactggtttcaggttggcctctgggtagcagtgcacaagtggcgcagatcagaatagcatttttaaaggctttaaaaaatgaaactgagagttgaaccatgcccttatgatcatagatccaaaaattctcaacaaaatgtaaatacataaaagggataagacacctataccctgaccaagtggggttcattctaggatgcaaagctggttcaatactcaaaaattagttaatgcaatctcccatatttacagtctaaaagaaaaaaagtgtacgattatattaattaaagcagaaaagcctttgataaaatttaacacccatttgtgctaaaaactctcagcaaagtagaaacagaagggaacttcctcagcatgataaagagaatctacaaaataacctacagctaacattatatttaatggtgtcagactgaattctttctcccaaagatcaggaacaaggcaagcatgtctactctcaccacttcttttcaagatagcacagtgcaaccaggcaagcaaaagaaatatagtttgaaaaggaagaatatctgtctctgcatgaccaaggattaggcaaagagttcttagacatgaaatcaaaagcatgaaccataacagaaagttggtaaattagagtttatcaaaatgaaaaatttgtgttttgctaaaggcactgttatgagaatgaaaactcaagctacagattgggaaaaaatatttgcaagtcatatgtccaacaaaagacttgtataaccagaatatataaagaattctctaaactcaacagtaagaaaacaagccatccaatttaaaaagcgggtaaaatacttaaaaatacacttcaccaaagatacacagatggcaaataggcatatgaaaagatgttcaatatcactagatattaggaatatgcaaattaaagccacaatgagatactactacacatctattagcattgctaaaataatggcaatattggcaatacctactgctgatgagatagcagaacaacttgatctctcatgtactgttggtgggaatgtaaaatggtaccaccagtttgggaagcagtgtgatagtttcttataaactgacaaatatgactgagcaaccccattcctgagtgtttacactagaaaaatgaaaatgtacatttacataaaaacctgtacataaatgttcatcacctcaaactggaaacagtacaaatgtcctgtaccagttgaataaattgttggatgtctatatcatgagatattacacagcaataaaaagggacaaactattgatacccaaaaaggatggctctgaagacattattctgaggtgaaaaagccaatcccaaatagttacacagtgtgtgatttcactttatataagattctcaaatgacaaaattacagtgatggagaacggattagtgatgccaaagttgtggatggggaaataagtgactataaagggataacacagggagattttttttggggggtgagtgatagaatagatctatatcctgatagtggtgatggttgtacaaatctacacatgtaatacatgtaataaaattgatagaactatatactaccctccaccaaaaatgaaaagaagatgaagagagaaagtacatggaaaaactggtgaaatccaaataatatctgtcatttaggtaatattattgtaccaaattcaaattcagtcttgataattgtactaaggttatttatatatgatgttctcttgggggaaacaggataaagggtacaggggaactttctgtaatatatttttaagagcattattgaagtatcatatacataatattaaattcactcatttcaagtgtataattgaacagtttttagtaagtttacagagttgcaaaaccattaccaccatttttagagtattttcatcaccctcagaagaaaccttagaatcatttgcagtcacctttgttcccatcctcagctttaggcaactttctgtctcaatagatgtgcttttcctagtctctgtacaatttttgcagcttctatgttaagtctaaaattatttcaaaataaaaatgtcaaaaaatgattttgaaaactaatgaccttaaaatttgttttactaatacatttgacaaaattataagacattcatgttgactctttctatgcaaatggatattttaaaggcttcatattcaatatatattagaaaaaatacaaagaacaagattatgatatagttctgttagtcagtgcttagaagcactagtcttattagagcacccaagataatgcaacagagaacagagaaaattcagctgttattgctgacaaatttaccccacagagaccagtaagaaatacacaggtatgcaaagcacttaactagtttatttccgtgggtgatacaatatatttaaaaataaaccctacaaatcctgaaaatcaatagtaaaggaaataacattaaaatttcagattaaaataataataatgttgatgaacattaaagtattccttaaaggcttttaccaaaagaaaatctgacagagagaaaaacctatataagaatctcatagaactttaatacagaaggtattaaagtacttttatactataaaagtacttgtttttatttttaaaacaataagctcaggtgataggacatcattttaaaagtatttcaataccttcagtaaattctagttactatatgtatattcgtatacatgaatatgtgtgtatatatatatatgcacatatgtgaatgtatttagtaaatatatgtgatttacaatgacttaaaatataaaatttctgagttataagttttcttagaccaaataaaatatattcttagttttcagctaataaaaaaagccttttaaaataaagcaattttgatataacaccttattcaaaagagtcagataataatggagtacagattggtgtaagctttttagaaaacaatcttgtaatatgtatcaaaagccttaaatagttcattatctggttttagaaatcacctttgtaaaaaaaaatctgaggtgaggacaagaattgtgtgcaatgctgccctccatatctttgcattttaatgatgaaagattttttgaaagaaaatacttgcattaaaatggtgaacattttgaataattaaaaaacctacattatagagaataagtcaaaaaaatcgtgttatgtccacacaatggacttttcaaggtaatctataaagataatattgatggagacaatataacaccatgggaaaatgcttataatataatgtaaaattaattttaaaatcaaggtacaaaatatatatcatacattatattaaaatatatttatatttacttaatttatgctgatttatatatttagttaatagtgttgataaacatttatatttattaacatagtgagattacatatttgcatatgcattttaattttatatatcaatatattaacctgtttattttatgcacatatattcatttatacatatatagtacaatattgatagtgattattctgagtggtgggtttatagtatacatttattttgtactttatatttttgtcacacatgggtttgtcacagcatatgtatgtgtaacatgtgagcatgtaataatgttataaaaagaaaaaaagactattggcttgaaagtgaagagaactggcacctagttattgtgttgccactaccaggtaaccccaggcagattgttaaaatattctagttctcaattctatcacctgttaaaggaggggttacgttatgccattgcaaagtttcattatagctctattcttttgcagttcaattatctatcatgtatgaggccctatacgaggcaatgtcagatggatgaagtgcacttaacttcatggactttaatgtccaatcaggaggaaacaatcatgaatatacatacatacattcatgtagcatgagggagaacttggtgagtgccatgaggggttaggttagtaaagggaaaagccacatctgtcagggtgagtagaaacattttaatgaaggagttagcatagtcagccttatatcttctactccaagttcagctgattttctcctctataattttctcaattagtttccaattttattccattagtcatttggatcattattagtttttatttgaatttcctctgcagtgagccctgtcagcagccaaagagtgacacagaactagtgaattggaatccaaaagaacaaatcacagctcagttaacaaatatgttggctaaatgccagcctcagtaggaaacagtcagccaaaatatttatcaacaggattttaattctacagtttgatttaaatttctgctcagctgagtgtgtggtatatctagctagttaactctagaattctaatcaaaggactgtcaaagcagcaagacaaatatttgtgttagtgctgcagttgctaacttcagatgagatgatgtggctcttgaacacattcagacaccaccctgagttcttggcagccctttgaggagtcctttatggtgcttattaactagctttttgtgccatgccagttgtatgtccccatatccccatataggcttctagaatacgaattctggcttgttaatggcccaatcttggtagaaaatgcacttggagtggttttctggtaatagttatataaacaggcattcacaccaactcaggggagtctcaggtgtgaccatttatcttgatgtggggccacctgctgtgtcatcttcttgaggaaacttctcaaggagtggtgtgacttccttttaacctttccttctctttctgctctctccctcctgcctgcacccacacatttctctgtgggaagagaacagaactctgttcttcccccattcatcaccacttcttaagggagagaaatgttgttttcgttcttcaaataagtgtagtctatcaccatactaagctcaaatggttagacagaaccatcaagccacttcaggaagagaggagttacataggaagtatcaggtcttcatgtttcaacctcttgttggcagaaaaaaggatagggaatcaatgtttggtttaaagtcccataaggaagtggttattcccttccaaagaagtataaactgcctcccctttcactgtcatgaggcaaatagatttctaaataggaaaagagcacagagaatttagatgtgaacacagggtatttagaaaagcaaaattacatcactaagcatgcatagaaatcatcacacaggggtccccaacccctggaccatggaccagtaccagtctgtggcctgttaggaaccaggctgcagagcaggaggtgagcagagggcaagtaagcatttagctctgcctcctgtcaaatcagtggcggcattagattctcataggagcattaactgtgaactgcacatgtgagggatctaggttacgtggtccttatgataatctaacgcctgatgatctgagtctgaagtggaacagtttcaacccaaaatcatctccttccttccccaccccatgtccatggaaaaattgtcttccacaaaactagtccctgatgccaaaaaggttggagacagctgacctatcactgtaatgaacatggagatggaccacccatatcttccttcatgcctgttgcagctgggagtgcagttagcaattagtcctcatctatcagcctctttggagatcacctcagttgcaaagtaaactataaacaataaagaaggaaatatcctgatatgaaattgaaggtggtttctgccatattgggaggaaataaaagttctgcctgagttagagatgcctggagagagggtgtgtgcgtgtgtgtaaaacagcagtgctgaaacacgagttgagacctgccctctgcctccttctttaggaatagatggaatagaaactgtaaatggacttaggcttgaagtgcctgggccaacctgtgccagcctgggccttagagtgcctgggccaacctgtctaccacaaaacagaaatggcagaatggcatcgtgaaggagaggagagagatgagaaagcatattttggttttccagtggctgaatgtggtctgcagaagtttctacaaagaatgggaatgggccaaagggccaataagctgaaagaaaccttcactttgaatgaggagggcatagagaggaagttggcagggaccatgaatcatcagcaggttctagagctccactaatgaccaactggatccatttccaagaccacttagcacagtggatatagacatctacttcagaggtggccagcagggatccagatgactgcatgagaactggactctcttcctctgtgttgtgtagttatacaagtacccactctgaacccagataacatactggaaagaggacaggaaggggaaattccttgagaggggagaatcacttagataagaagtttgcattttgaattgactatttaaatcctcagttgactatttacaccaacatgattgtgttaacctggacaagactgcagtgaattggaagtgacagttacctccaacaggcaagctaagttttccatcaccaccaatcagaaatgagggctcagaagcaagttatattctgttgtaaaaaaaaaaaaaaaaaaagaaaaagccatatctcttcacatctgaagtgctgaattgtaaataaaaaaaattaagccacctatgtacatttaaaagtaacatgaaacacttgattccaccagacatataactgaaaagtgttccacgataggaaaaatcaaaacgatatacagcatttacccataagacaaatacggcatataagaacaagccacaaatccatatcctgagtcctgcaccggtgctctaaaggcttactcctaatctcaccccttccgctattatgcaagggtaccttgggttggggctgcctttatgattaaaggcatctcaatttgcccatagtaaaaataagtaaaacccaacgattttcatcacaaaacactgagcaaatgctaaatgacaataattaaaattcagaaaaaacaagtcttatccctattactcctatctctatacaccgtgccggatatgattctgagagacttctggaaggcagtggggaggggaagaggaggcagttgctggcagaaaatcagagaatctgcaagttatttgtgcataaactgagtgggacagggcttgctatttgaattgtgcatgcttctgttttatcgaacccattcctcacccacacgtattataggagctgtcatctcttatttacacactacagggtacgttgctcaaataaagagggcaaagcgatatggagcacatagaaaagaagagcgtttacattgaaagtgtgagtatttattaagcaattcaacacattttagatacatttttaaaagatgaagtaacgtgtgttgacagtgtccacggtgaaaaggagttattttctccccaaatattcagcaggctgtttgaacaggtagtaccttatttctagattgttgtttgaaattgtcctagttccagctttttaaaaatctccctgagcgtcagttttattttgtgctaagtgggaacaaggagatctcccttgcagggttcctatgaggatgaaatgatactccatatatcaagcactggaagtgtgagtctggcacactctaggggccttgtcccctttatcggtgggtcaaaatgtgcccctctgttctggtttccttagccttatattgagggaggagattgaggggatgtattgccatgaaacctttacaaagagcatggatttcttctccctgacttggtctaaatatggccttaacacacacaaccaaatgtcccttggatagagctgctagaagatgtgggaagcatggggaaggtgagcagcaaaaaacaacagaaagatggagagggaaaattagaaagaagtttgtccctccatttccttatctctggttactactctgcacacacctcatcctcgtcccctctttagccccagtctgtgttgcagttacagcatacacaaatgtctgctcactctctaaggtcattatgacattttgcttagttcctcagacaggtaaaagcactctttatgaattagcccaagaatctctgtatgttctttttttttttttttttccgagatggagtctcgctccgtcacccaggctggagctggagtgcagtggcacaatctcagctcactgcaacctctgcctcccaggttcaagcaattctcctgcctcagcctcctgagtagctgggactacaggcgcctgccaccacacctggctaatgtttgtatttttcagtagagacgaggtttcaccatgttggacaaactggcctcgaactcctgacctcagatgatctgcctgcctcggcctcccaaaatgctcagtcaccacgcccagcccatctctgtatgttcttatatgcaatgttttcctcacttctttcaagtccagtgtgttcaccagactgtgagctccttgaagctaaattgttattgtaataattattaacatattactagttactctatgccaaatagttttaaaagatattagctcataaaatagtcacaacagccatcagttaaggtgttattatcattttctctcccattccatttttaatttttaaattgtagaacctatatacatagccacattgcatcttccttagcctcaaccttctttctcttttgaagttcttcaaaacttcatggctcctacatgacacgtaagcatattatgtacactacgcaagataatactcttcaaaaagtgcaattactatgagctatgagctttatctcatctgctacttccagtttatacctttgttatttaataaccattgcttccctcactagttacttcaaactatatttcaaaatcaggggagagaaaacgatgacttgtgaaatcacctaacaaagtgaaaaatagactcaaagttttgattccatttatgtgtattcactggatttaagacctgcttaaaagccttagaaaaatgatttaaaatactgacctctgactatatgtggctgttgcatcatcataaccacccaccatcatcaacttatattgaatagtaattctgtgccagctatcatactctaccattcaaatatattatctcacttaatcttcacaacaacactatttacaaccttcttcacaacaggaaatcggtgcttaaaaaagataaatgttttacctgaggttacatccaaatagcaaaccgaggactcaaacccagttgtctctgataccagagtttttattctttactatgcagttctgccttccagaatttatactgctcacccatttaatcatagtcaaatcttctgaaggctaaaagttaactgtaacagaaatcccttaatctacttaacttcattatgagaaacatgccatacctttgagaacccacgacagtcaagagatagaatgtggcccaaggcagttcaaatatgtctaagggtatttttcagctacttccactcattgcctttaacacaataagcacttaataaacatgttgattgattgattgaataaatcaataaaaaatcaataaaagcaactcgatgagggcataaaattattggtacctaatctttctggcctgaagtttatgtagaggttgttccgctatcgtctagtatttaatgtggcagagattggacactagaggaaaaaaattctggatatttacatgctttgtattgtgacagaaaactaatcacggtgaattgaggattgagtttccatttcttactgaaatggggtaaacattgccagtttgcatccttgcttttattctcaattctgcaaagttaactataattaaattaagcatttaaagcctgatagcatagaggtcaatagcacaaggtgtgaagccagactgcctaaattcaaatttttacaagctgagcaattttgggcaaggcacttaacatttctgtgcctatctcctatatgtaaaatttcctatatgtaaaaatatagtagttagctcatggagttattgtaatgagttaatacatgtaaatcacttagaagttcttggcacttagtaagtacatattcatcaagaacatctagtacgatttccaggatccaagaggtgttcgtttagtacagatcctctggaatcgctggtatcttcttctctccttactgcatatatttccaacactcttgagggaatgaattaacagaaattccctgcatgtccaactacctggattctttccccctcactcactgtgctttattgtcagaactttacctgtaaaaacccattacatcattccagtttccccagcacagccagcttccctttatccccattctttggctgttgatagggaaaaactgtctcaaaatagatgtagtaagagtggtgctaagggtttgaactgctcaggaagtggataaaggtaatgaatcagacagaatttattagaaatatttacagaaaacatggcaaaaatagaataaactggctgctttgtgaactcctacccacacagtaaggagatgactgttcagttttctggttcagacctgagtagagaaacaagaaagtatttccctatgtcttttacactggtaaactgtttcagatggcaggctgagcatcgagattttacattcagttccataagctgaacctacatgtggctgctagggcttccttgcagcatgacagctgctaattccaaaggtggacactcccggaaaattaagcagaagctctatttccttccatgatctttgcttctgaagtcacatagtatcacaagcccacctacagcccacagcttgaagggagggaagtcaaagtcatatcgcaggaagagcatgaaggatgatgattatagcatctgccccatctcccctcagattctaactaacttggcctaatggtctctctcaagtgtaatgtcatctcatggctggctcctcacaggtgtgtgttcctgccattcctctagcagattctggtctcctaaggtttctgtctcatctccctccatggctagacctgggtccacttgctcatatgtgcttggctttgctcatcaccactatgcccactaagtatcagctttgtctgacatgttttatacatatgccctttacctctctgtctctcctccagtaaagaagggaattccctttattttaatatctttagtcttagctagtgtaactagttctggaaactaatgttctgaataatttatcttcctgctatcctgggcatatatgattaagcataaatgaatgtattattggccctgtctgctcagagagtaaatctgatcattttccaacttgaggcagaactggaaagagaatgggggtcgataggtagtggaattcagggttgctgctaattaggtattaaaaatgccaaaatataggtccattcaaatcctacaggggatataccaataaaacgtaacactctttgcattaaaatacgctttctagttctttacactcctttaggttagtgctctgtcaactcaagcatcaaattccttgtcaaggctgtttctcttttttcttaaggggtctccccacccctcccacttttctatggtcatgtctgggaggatgaggaagcttgaatgctcctagaagcagtggagggctgcctggtcctgtgttgttcctcttgtagtcccttctgaactcgagggtgaaagtagttcacttcacccaggatttaggtagtaggtctctgacctcagtgcaactgtggctctgcacagctggggtcccctgtggcaccatagacttatctcctaaacactcttcttcttcattctgcagaagacttgtatgtccactttttgtcagatagtacccctcttgtgctcatagtctgggccttctctataccagagtttagaataaaattatatgattattgccagataagtttgagtcttacgtaaggggagcttctgcaattcaggaaatccttttagccttcaagacaatcaaaagctacacattcactttctgctattgctttatggcttccttcctggaggcaaagccttcctctagttgaatgtggaggtcacaagcaaataaaaaagggaaaaatgtattaatacattctaaaacatcctctttgtttcaatatctcttggctgtctctaatcccattcattccccactcatcttttctccctactttatctcatcacactagtccccacaccagaattaaaattttcctttaaagagcattcctctgaagctgacttccttcaagcctgcaacatgtgagcaaaaatgacaaaacaaagaggggaggactacttgttgttaaatataagaaaggaaaggaagaaaagtaccaagccaatgagttggagtttgccagggaggcttctaaatttattctgctgtgaattctaagtggggcattggaaacttcatatcctggacattttcttaggtgattagtaattaaatgtgcatccaaaaaaaaaaaaaaaacctgcagatttgcgctcaaccccaatttggttcatctgaacacaggagcacttgagaaatgcaaaattctttaatcactccaaattgcccaagcacaaaccaggccaagagcgtcaattgcttctaaaataagatgcaggtgttctgaaaaatctacaagcagtctgctcattttaaattactcttcactccatgtgcccatagggaagggaggattgaagaaggcgtttttttttcatcacagcctcactggtggaatgacagtagtgattacaaaaaaaaaaaaaaaaaaaaaaaaaacacagagatatcatccacctcctctttctgttttacctgcccaaccaaagttggtacagaaaatacatttcctcagggaaccctttgattacaatcctaatggtcgatttcatcattggttttagtttttcaccctttctgaattataccctttgctaagtgatcctgaagatcctctcagtacaagtacagagcatatttccccacatcttgactttggccttgtccatgtcacttcctttgtccatagaatatagcagaagggattgtgtattagtcctttcttgcactgctataaagaaatacctgaaactgggtaatttataaataaaagagatttaattggctcacagttcttcaggctttacagtaagcatggctggagaggcctcaggaaacgttcaatcgtgatggaaggggagggaaacaggaatgttttacatggccagacgggaagaatagagagaagggggtgatgctacatactttcgaacaagcagatctaatgggaactcactctatattacaagaccagcgaggggaaaatccacacccatgatccaattacctcccaccaagcccctcttctagcattgggtattacaactggacataagatttgggcggggacacaaatccaaacgatatcagaaggtatgtcaattctgagcccaagccttaagagtccttgtttgattattcttgctctccgggacttttgccattaccatgagtagaatatagcctggctagccctttggtcccaagaagaaaatgaaaaattcatggaacagagctgccccaaccaaacagaatgtgaaggagcccagcctaaatcaactggctgtcagccaaccacagatgtctgagctaaataaagtcctattcctgtgccacagagtttctgtggttctttgttccacaacatcattgtagcaatggcaaattgacacagtactaaacccaggcataaaaagctaggagtatcatattcttggtctgtgctgtaactctattcttcattgtgagtatagatgctatattctattgtgtataaaatttgcagtattcatgactgttatccccttaatattggagtattattttggctgcaacaattgacacaatccatcatttccatttctctgaattttaaaacatttttaaattttttttgccaatatccagaatttttctcaacttaatgttaactagatttttaaaatagtgccttctctttctaaaaaatgctctctaagggtttttgatgtagggttatgacatctccagaaaaagtgtaccttctcctatggggatgatgtctataggaaatgaaggcattctgctgtctgtcctcggagtgtataagaaagcagacaacactgagtttgaattcaaatttactagctgtgtggcctcggacaagttacttaacttctctgagccccaattatttgatcgtagggcagttaaattaagtagggaatgtagaacacccagcatggtgcctgatgtatgccagtagaagatctcaataaatgcttcttttcaagtgtgactccacttctcatcttatgcaaggagctattacagctatgtggaagaatagccatttaggtatgtaactaagattgttcaataagaatttactgacatcctattatgtgccaagtacagcactttattagggacacaacatctgtaaggcatggtgcttggcttcagtgaactgatagtggaggatatgctgggtagtattttcagtgttttgcacatatcatttcatttaacccccataataatcctacgagattttatccccattttgtagagtggttaaccagatccaaatcatacatctagtaagtaacagagtgggaattcaaacctgggtaatatgatttcagagctatgctcttaaccattttgctgggataatacccattaaaattaaatatgtacatgctccatgatgcagcaattctacctcctcccacttctcccgcacttgtgtacaagacaacataagaaccttcactgcagaaccatctattatattgatgaactaaaacaacacaatgagggaatgtactgaaaaaatgtgcattgcatcatagcatttatatgatattttagattccattaggtacatgtatgtatgtaaatacataagaaaattcaccaaatggattacctcttgggagctgactaggaaagaaagtgagtgatttataaggacctagacattatctataatgtttgaaggtttaaaaatgagactatatttggatattactcattcaattaaaaattaatatttttaatctctccttaacaaaactcagtgagaaaatccaaaggctgatttgaagaatattctatgagcttagcaccagctgtgtaacagttgggcacaggaaatataacaagctgaaaaaaatcaggattagacaactataaaacatagataggaccattaccctccaaatgaatcatacacacagaaaggttccaaggggagattaacatgtcagtaaagaagggtttgacttccatgctcacatttatacagaccggtgtaacaaattttatagagtcacttcaaagaagttggtgatgatagcgatggagaacaggttttccttgtgctgaacaattttaataagcctccaaataaccagcattaaacagtcagtattagaaagaggaaggcagagcaatccagtggaggaaatagctatcttggcttgaagagacctggtttctattcctggctttccctcaattcagttaccacctgcagatatatagaattttatacataaaaggggtcttttagaacatatagccttgttactttatagatgaagaaacagagacatgggcagaagtggatttcctggcagcaaaagatcctaaactaggattccagccctttcctgataaccgcacagtcttatgaatgacccctccattcatgggtgaaaatggagccacattgacaccagtccacaccatgggaagctgtaggcactctgacttatgcaaggtcaagcctgaactttttattaagcaaaacctacttttgaaagagacatgggagaacaaatgcatatacattaatttgttcactcatacgttttattcttaaaatattttctatgtacttacagagtattaagggtatgatatattaataggcccttttagagatcagaaatagatttcctaccaggaaataaatctagtagaaaaatatgatggttgtgtgtcactgcaatattagcacatgtaagcaatgtaaaaaaacccatcaatatacaagaaggataatacattataggtaagtgggtttcatctcagaaacacagagttggtttaatatttgaaaatgaatcaatagaattcatcacactaaagaataagggagaaaagcatactgtcaccacaagagttgcagaaaagttatttgataacattttaaaacctagtcatgttaaaacctctcagaatattggaaaataaaacttcctgagtgtcataaagcacatctatgacaaacctggagctgacaccatattttatggtgaaacaataaacatctgttctgaagatcaggaacaaggtaaagatttctactatcactccatcttttcaatagtgtactgcatgtttcagccagtgcaacagacaaaaaaaaaattagatcaggagtgatgtgtcattacttacatgcaatattattttgtactcagaaagtcccatagaatctaaaacaaataaaactaataaataaattagcaaagtcacaggataccatttcaatatacaaaaatcaattgtatttttgtttttaataataatacaaaaatataataatttaaaataaaaataaataaaatacctagggataatcttagcaaagcatgtacaaactatatggtgaaaactataagtaactgttaagagaaattttttaaatattttaaataaaaatgtaacatgttaagatgtcaattttccccacgttgatagattcagagcaatcccaattaaaataccagcagaattttctgaagaattgaccagtttatcctaacatttctataaaaagtcatgtgatctgtaagagccaaagcaatttgaaaaataagaatattggagagctcagattatgtgaattcataaattatgaaaatatagtaatcaaaaagtgtgatactgatataaggatagacaaatagataaatggaaaaggatggagtttagaaatgaatctatacaaacactgtacattgactatttttcaacaaaggcactaaagcaattcaatatggaaaaaagcgtaaaaatattttaacaagtggcaccgaaacaactcgatacttgtgtgtgtgtgtgtatactctcaaatcttatcctataaacaaaattaatttgagatggattataggctgaaagaaaagctagaactataaaatgtcaaggagaaaacacaagagaatatttctgtggctttgggaaagacaattatttcttgggtaagatacaacatgcaataaacataaaagaaaaaaataatatattggattaatcaaagtttaaccaaactttttttctcttaaaggcactattagaaaatgaaaaggcaggccattgaatcaatatttgcaaaacaaatattcatagcataggaagaactacaaatcaataaaaatacaaacaacccaatttttaaacttatggttgaagatgtgaacagatgcttcataaaagaagatgtatagtaaccgataagtacataaaaagatacccaacattatttagtcatcaaggaatatgatttaaaccacagtaatatttcatgcccactaaaatggctaaaatgaaaaacactgacaatatcaaatgctggcatgcatgtagagcaactggaaatctcgttcacttttgcagggagtgtcaaatagtataaccactttaaaagactggagtttcttataaagttaaatatgcatttactatatgacctagaaatttcatttttatgtattttcccaaaagaaacaaaaatatttgctcatttaaaaacctgtataagaatcttcatctcagccttattcacaatagctaaaaaccgataatagcacaaatgtccataaagggagaatgaataaaacatattttagtatatccaaataatagaatactacttgggccacactatggatatttaaaacaacacagataaatctctaaaacataatgttgagagagagagtggccaaacaaaaaagagtacatttacatgaacttcaagaacatgcaaaactaatctatggggatagaaatctgagtagtggtcatcttcttgaggaagaagagcttgtaaggggaaaagggcatgaaaagatttacttgggtgatgaaactattctatatattgttttgggtgatttttacctaagtgtatatacatgtcaaatgactatgcattgaacatcaaactgaatcagtttgtgctcctggacaaaatttttatatgcatatttacttcaattttttaaaaaattggttaaaaatggttcccaaaatcccaaagaggaaaaattctatttcaggataaacaaccaacattttcactgtcatccatgtaaggcatctacattatccattctattaccaaaataaaaaattattcaacatctttaggcagagggtgtgtgtctgtgattcttttattttctctccctccatctttattcttttcctccgttcttcctttattccctctcctctttcattactccccaccctcctcctcctcctccttctctccctcctttcatttccacttcctttccttctttttcttttgagggtccctagaaaattggagaagattatttgaacagtaccatttcacataatccaattatttaaattatatgcatctatagcataataaacaaatgtttgcctatcaaacctttctccatgggcctgcacaagcctacaaccaagatacggtatttctgtaacttcttttaacaagaatccagtgaaaagccagattcaagagaaagtataatagcttttgttttaggtcagtgtatttcacataagcctctttctgggtctgagttctcaacgttcaagaaaataggatgggtgcctgatatcaactgattcattttcacttgttaggtctctctcctttgggccccatggtactcattgctctgtgattggacaaagtcttagatctcccacttgggcattggctagcatatgttaaggcattgaaacttggttctggcactaatctcttatcactgcagtagcaatggaattgtgcccactaaggttggattcaatgagttgacagagagggaacaaaagcttaagggtgcccatctacagcttctacacacaagcagatattttcagctcttgacttgccaataattgttccatctttcacagcactctaattgtaaagtagtataaagtagtctctatgtttcatgaaggtggcttcagattttgcttaaaagaatctttttcttctggcagctctaccttcttgaattggtttagaacacatcagttccattgtctgtctcacactcattccttgcacagttaggtaaagcctgggctctggagtttctgttttgatcgaagtagttatttgttctcctaaccgtgccttgtgagggtgtgtgtgtatgtgtgtgtgtgatgaaaatacagtcatttaattttgaagaatttgtttgggtctctgcttataaagacctcttccagacattgctcagctaaatccgtcatcatatatctggctgtatttatcatcattatctctgcagccaagcctgattctttctaataaacaaatattgagttaatataaaataaaatttattgtaagtttatttctgcacttggtctcatatgcctgcctttctgagttctcctctgactgaataaccactgaaatcagaaatatatttgagatttaagccaacaggtattttgctcagactggttatcctattttccaagattctcagtattttctaaatatctggcctcaaaacacaggccaggaacttctgataatacaatctgatacaaataaaaggaaaatcaccaatatcaaacttctgtctattaagtctattcaagttaccaaacatctttggtgtacccaatatgtgtagaacctagaaaaacataaacgtgttttatgtttatggtttatgtttataaaaacataaaccatgtcttacatggtttctacatagtcatctcttgaactcctggcctcaggcattcctcctgcctcagcctcccaaagtgctaggattacatgtatgagtcatcatacctgtaatctggctagtcatctctttcatagggatcacatactcactccgtcaaagttcagatgttttaaaaaaaggcgtcactgtgaatgagccaggaaatcaaatatatcatacattctaacactctgtagttgtacagaatataatgaatatttgctgttgtctagaagatgggatgttcacatccagtttctgcgctaaggtcctggaagagaatagaacacacatgtggatgggaaacatggtaaataggtaaaacctactgagaaatgatggaaccttagaaacattgtccacaaaaggactttccaagcatgatccttcctggctaacaataaaaattattaatatttattgaatgcttacactacatagcaggcactattctaaagctttatgccttaaagcatttgatcctcccgtgaggtaattgctgttgtccctattatacagatgaacaaaattaagcacagaaaacttacccaatgtcacagagctaataaatagcaaagctggcatttgacaaccatcaggttgttgagcttgtgctcttccccatgatgatatatgatttcattcattcagtggaataagaggatatatttttattaattatttctgtttataagacataatgcttcaagtatatacattagcatccctgacttacatcatatatacataccaccttggagcatgtgtcaaatctttgcttcaaggattgtgcaatgagagaaagattagaaatcatgttcttctatccttctcattctttaaacaacaccttattgaaagatactctgtgctaatactagtgcaagattctagtgttttaaaagtgtattcaaggaaattaccctttaggccaatgcgtatcatatatttttagcatcaaaactgattgtgggtgctttcttcactctaaaaatcttaaatagaaccctgcaatataaattaggtaaacgtgaagagtgggttcctgcagcagtttcatcattcactgtttggcaggaaatgcttccttatttttaaagttcccagaacaagtcagtggagccctagggttggtaaatgtttggctaaacagtaggatgcagtaaagtgagcaatgaactgggaactactaaaattgattagcttgactttggggggatatttctcagtctccctgagccttattttcattttagagaaaagatctgggttctggaaattctctaaggcctcagatatgacattctacagttatagataattggtgctggttggctccaggatgggatgttctttctagtgcccactttctaagaaagggtcaatgaaagaaatattctgtggaacagcagagggaaaccctgttacggcccttcatgcctctctacctcccatcctttctgctgctcaaccaggtatactcctagactaattacgttgtagaatccactgaaaaatccaatacaatcctcatttctcctaacaacatagcaatttccagcaggtgttaggtgcttaaaaaaataaaagaaagagtaaaaacttcacaccagatgtagcccatataaatattaccacacaggtgctgggaagagaataagttctctaaattatgcaaataagtcttcttgacaattcaattttttagaataaccatatatatatttctttagagattttttattaatttaaaaatatcaatgatccatgtttgcaagttaatttacacaattatatcttcaaacttctctcaaagtcttaaagccaagagaattaaagctttgaccatgatttgtcctctgagaacataaggagtgaaaaaaggttgaatccattgcattgaacaggtaatgcaaaagcatcatttcaattccagcttcatactttcctgccattcaaccctatcaacagatccattaatgaaaatagttgagttggttttctccttttgtattttgttctctattctaatgaactataatttaactactactcaaaagacaagcagccccagataaaagataagaaaacagagaagcacagatcatctacatagaaacttggataagaaaagttggttatattcacaatgagatagtgtttgatatttactgtaaacacaaggagacatgcttttattttacttatcatccatagtggcccttttagaaattggcatgaaagatatcttaggtatcatgacattctaaaacttttataaaaacttttagacatttttctcccttgaatgtcatcacaccagtgaaacatttggaaatgatcactctcaaattcttcccaaggttatggcaacttaaatactatgagtgcctaaaccattacatagtggctacataatcttagcagcaaatggagcaaaacacacctaggagttgtggctataaggcaataacgttcattatacaaatcaccaaaatcaatctttacaaaattgcaatttgacatcaggcaactctccacaaagggatgcaaacactttgagcttgaacaactccttccctcttaagcagtgcttttaggaagctttaaaagagaaagagtaatgtctggactctgctcaccaaaatctgaatctcttgggaatgaggaccagctatttgtattaaagttgagaatcactgtctaacgaagctagtggagctgtgggaatgatattattagagttcaaaaacatttattatatttttcttaacttataaaggacatgtttacacaagccaaatgatgtaagtgtcagaagtcataaatgagacccatgctaagaaagtccatgcactgcagtctgtccaagagaatcctggtgtatacctgttggttcagtgtaattataaacagcactccattttatttctaaaatatgagaatttatatggtaacctcatccatgaagctccccaagatagccagccacaaatcctggctgggctccttatcttgttcttatgtgatggcaactcgctgttcctcaagatgctcttctctattcaatactcatcattgtaaaccacctacagttgacttccttttggctacttttgcaacccaatctagcctttttcctttgtccctgtttcaattactttccctcaaatttagcatctatctcagctacacattagaaacttcttgagagtgggtggtgagtcagagagggctaaatattccaacacccaggccacactccaggccaataaaagtagaatctctgggggtggaacttatgcatcagcaatttttaaaggtccataaataatttgcattataggcaagattgagcaccaatggtgtccacaagattccaataaacagctaatgttgccaaccactgaattacatccactgcagatgacaagtgtccctggattcagtctataattctgctgatacccaaacgtctttagtttctcaactttatgctagaaagaatctcatatgtcagattctgtagggaaaacatgcaaagagaggcattcaccttacttaaataaattgtactaatactaacccaatagatcataggccagaaactaaataaaatagaaaatatcagtgcaaatccatccgcagaatgactccatcattccacactatttaaagtcagcaataatctccctcattccttttttcttatcctcaacaaatcaccttgtcctaggttttatcttatacatacatatgacaaccccaaagtcattatttagacaaactaaggcactttggtctttaactgtcatcagtcagtccttctgtgtctgtaaagttatgttggtgcatcacacaacaaagcatgaaaacaaatgtctccataagatatgtttgggagataatgatggtcacagtaaaaagctaatccgccagagttagtagtttagttattgttactaagtggcaaggataacattttagaaacggtacatatattaattgagggttactgattatgtagaacccaagcggaggaaagggacaagacatgaaaaatccaaaaactaattgagctcattttaattatagctataaaacacaacaaagaaatggcaggatctggaatgggaaatagttgagacaatgtctagatattcttcagattttcttgccccaactcagagaattaagacatctggaaactgtatttacttcccctcattgaagctctccacacattttaacaaggcatttaatgaaaacagtgtgaacaagttggaaagcatacatggccttaggtcagatagactttattttgagtctaggtttggattacatgattaaattaatcaaactcaaagagtcttggtttttttatctggaaataggggttatattgcttatgtcacggaagatgctagaagaataaagtaactacctatcgtctgtgtgccaatcaatgcaaacaacaatgacacaagtaaaccacagttttagtacacagaagatactcacaactgacagttgagtttggctttgcataaatacctgatttgtgagtttgtctttaatctctgagaaaaaagtgctctgtccgacttctggacatcagtgcaaatgctactttcctaagcagtatcccatgtctagtatgtcttgctgcttctgtcatcactgactttctgtccacttcatataaaagtgagtttgagttttattcttaagtacaatcacacatatattaatatttccattttagactttctgaaacatacatatatataaccaaactttatagaaaaccacatatttggagtcagtagtgattgtcaaacattccttattgaagacattgttataggcttggttcagttccatttgattcagctcaacataggttattgtttactgctcaccaaaaagttgtgctttcaaaaagtttatagaataagtgctcaggactgagtctgattctgctgcagaaaactctcctgattcaaagattaaggatttgaacttgcaaaattcctcttgctttttgtacaagtagtcatcttatgactctgagtttagaatatctcatctttgtgtgtgtgtgtgtgtgtgtgtgtgtgtgtgtgtgtgtgtgtgtgtgacggaattttgctgttgttgcccaggctggagtgcaatggcacgatctcagctcatggtaacctccccctcccgggttcaagcggttctcctgcctcagcctcccaagtagttgggattacaggcgcctgccaccatgctcggctaatttttttgtatttttagtagagatggggtttcactatgttggccaggctggtctcgaactcctgacctcaggcgatccaccggcctcggcctcacaaagtgctgggattacagacatgagccaccaagcccggcctaggatatctcatctttttaaaggagaaataagaatatattggaaattgttagacttgagaacactaatgggacatttcctttaatataataacaagggaattcaggagcataaaaatgggcaagctttggccagaaaatgcacaaaagataaataaagccataaagctagtctacagtttcctagaatagtaaaagagggagttacactctgcatactaatgaagcgaagtgaggacaccaatatttagacatcatctccctactcaggattaagcagaatttattcaagtcccagtagacacagatattacccaggggctcttttctttgcaatttttttttattctatatcctttctttgaacaacatcaacgagatgtagagcaagaactttggtacattataaacctatatttgcagtccagagacatttctgtgttttaggaatctagttcaagttgtcttcttggtctttgatatctcaaatctctcataattcctatcctgactcttgagagtaccacgacaatatttcctggtacaaaattctcagtcatcttgactccaccttcttcctcgccatgcatataagcgagactcctagatttgataattctcccataaaatttcctaaatctgtcacatcctcattgtacccacagttcctgctctagctcaatacctcatcttctattttcaaaatatcctaccaggttcttcagtggtttccttacctctggtttctcccccaactaatctacctcttacatggccactaattgatctgtcaaaaatcctaaaattcttatatgacattcattttgatccaaacaaatataaatggtttcctgaaggcttatataatgccatgtactatctggcctcaattcacctatctaggcctcatctcccgtccgaccagaaaatcatgtgtatttcagtcatggcattttcttttaagttcttatatatatatatatatttttattatacttgaagttttaaggtacatgtacacaacgtgcaggtttgttacatatgtatacatgtgccatgttggtgtgctgcacccattaactcgtcatttgacattaggtatatctcctaatgctatccctcccccatccccccaccccacaacaggccccagtgtgtgatgttccccttcctgtgtccatgtgttctcattgttcaattcccacctatgagtgagaacatgcggtgtttggttttttgtccttatgatagtttgctgagaatgatggtttccagcttcatccatgtccctacaaaagacatgaactcatcattttttatggctgcatagtattccatggtgtatatgtgccacattttcttaatccagtctatcattgttggacatttgggttggttccaagtctttgatattgtgaatagtgcaacaataaatatacgtgtgcatgtgtctttatagcagcatgttttataatcctttgggtacatacccagtaatgggatggctgggtcaaatggtatttctagtactagatccctgaggaatcgccacactgacttccacaatggttgaactagtttacagtcccaccaacagtgtaaaagtgttcctatttctccacatcctctccagcacctgttgtttcctgactttttaatgatcgccattctaactggtatgagatggtatctcactatggtttcgatttgcatttctctgatggccagtgatgataagcatttttacatgtgtcttttggctgcataaatgtcttcttttgagaagtgtctgttcatatccttcgcccactttttgatgggattgtttttttcttgtaaatttgtctgagttcattgtagattctggatattagccctttgtcagatgagtaggttgtgaaaattttctcctattttgtaggttgcctgttcactctgatgatagtttcttttgctgtgcagaagctctttagtttaattagatcccatttgtcaattttggcttttgttgccattgcttttggtgttttagacatgaagtccttgcccatgcctatgtcctgaatggtattgcctaagttttcttctaggctttttatggttttaggtctgacatttaagtctttaatccatcttgaattaatttttgtataaggtgtaaggaagggatccagtttcagctttctacatatagctagccagttttcccagcaccatttattaaatagggaatcctttcctcatttcttgtttttgtcaggtttgtcaaagatcagatagttgtagatatgcggcattatttctgagggctctgttctgttccattggtctatatctctgttttggtaccagtaccatgctgttttggttactgtagccttgtagtatagtttgaagtcaggtagcgtgatgcctccagctttgttcttttggcttaggcttgacttggcaatgcgggctcttttttggttccatatgaactttaaagtagttttttccaattctgtgaagaaagtcattggtagcttgatggggatggcattgaatctataaattaccttaggcagtatggccattttcacgatattgattcttcctacccatgatcatggaatgttcttccatttctttgtatcctcttttatttcattgagcagtggtttgtagttctccttgaagaggtccttcatgttccttgtaagttggattcctagttatttttttttctttgaagcaattgtgaatgggagttcactcatgatttggctctctgtttgtctgttattggtgtataagaatgcttgtgaattttgcacattgattttgtatcctgagactttgctgaagttgcttatcagcttaaggagattttgggctgagatgatggggttttctagatatacagtcatgccatctgcaaacagggacaatttgacttcctcttttcctaactgaataccctttatttccttctcctgcttgattgccctggccagaacttgcaacactatgttgaataggagtggtgagagggggcatccctgtcttgtgccagttttcaaagggaatgcttccagtttttgcccattcagtaggatattggctgtgggtttgtcataaatagctcttattattttgagatacgtcccatcaatacctaatttatcgagagtttttagcacgaagggttgttgaattttgtcaaaggccttttctgcatctattgagataatcgtggttttcgtcgttggttccatttatatgctggattgtgtttattgatttgtgtatgttgaaccagccttgcatcccagggatgaagcccacttgatcatggtggataagcttttcgatgtgctgctggatttggtttgccagtattttattgaggatttttgcttcgatgttcatcagtgatactggtctaaaattcccttttttttgttgtgtctctgccaggctttggtatcaggataatgctggcctcataaaatgagttaaggaggattccctctttttctattgattggaatagtttcagaaggaatggtaccagctcctccttgtacctctggtagaattcggctgtgaatccatctggtcctagaatttttttggttggtaataagctcttatatttgtaatgcatattagtccttttaaaaatgcccttcacctcctactttttgtggtaaacaccatcatattcttaaagacccctcccaaatctcgcattctttataaggccttctctgtgagttgcaggtggtttttcaacctgtcccatatattcccatataatcacccctataagggagccatcaccctacaagataattatttgtttatgtgcctggctcctccactaaagctacttctgaatatgggctgcatcttatccatctttgtgcttctgacctccaccaccaacaaacaaggcatagcagacagcctggtattgagtagcatgccatacacatctgtagactgaaaagcaatttagcacgtgtacaagttgggctctccaagaagcagacctggagagagatcctagtacataggtatttattaaggtgtgcctttgagaccagtacctgtggatgggaagaatagaaatcaggagtgggcagagggaaaagttaagctgtgatgtaggcccagtgacaagccactgacacttctatggggagctgtaaatagacctttggcattgtcccaagttgggccaatatggccaggcctttacaggctcacacatcatttattgcttgtgggccactccaggaaggtgcatgactttgggtaaggaggctctctggagctgaggtaatccctgaaaggactaacagctgaagattgtctgctgagaatactgccgaagactaaggcaacaaattcttccacatacaggatctggatggcacatcacagtgcccaaaataaaggctgaacttatttagttataatctgatcagttaggaattgcaatcagctgagagtgagagagtctccacaacagtgatgcaaactcatcacaggctttttcttttaacaggaattccggagcaaggaagttattggcattcgtttagtgtaccacaatgctagggctgaggcctccgggatcctctgggcctttttcatggttgaaaaatgacagtggcagcttcattccttgtgcccagttccagagaggaggaatgagaaaggagcaagaagaaaaggctgacatctatgggaagccaaactttttcaggaatcccctgctcaggtttgctcaggcttgtttgacatcttactggtaagagcaccattgcatggccagccctagattcaagggaggctgaaaactgtaattttacagctgaatactactgcctctctctcatatgccctcaatgcagaattctttcagtgaaaaaataaacaatggaatcgggtaggcactagaaatttctgctacataaactcaggctgaagaatccaggttcaaaagaaaaataagtgacatgtaaaaagatcagataacatggaaacagggaagattcataaggtaattgctgttgtgtaaagtgactatttctcacttagcacagcaaaattacgcgaattaataaagtctgccagaggagattaaggaaagacaaaggcatacaacctgacacaacagagaacacgttgctgggacaaagaatcaaagtcatcttaaattaaagagggcacagaagagaataacagagaaaaggccaaaacaggaataagacaccacctggcattaaaacaaaacaccaagcataaaacacaaagactgcaactactagtgagcagcagtccttagaaattcaggtgagaagtcaaaaaggcagctggtggggctgcaagtgtgttaaaagtttgttgccagtgttcataaaagaagttaaaggttacattttgaagatagaaataggtttccctaatgtggggaaagaggtgtaaagagggctgtgacacacaggaggaactgccttccctcacccgctctttggggcacagctgttcggagcaggtcagaaaagctaagttgacaaaaaacatcaggaggtgataaagtgagaaccctggatccagaatgcagcaaacaaagaatgaacaaaaagttaaacagattttaagaattagataagaattaaatcaaggtatagccaaagagtggccaatattaattctatgattaagaaggaaaggacacagaggcaatgttgaatgagccactgtgaattttaactccagtcctgaaggaaggcatgcgggtggggggtctccttgagaggtcaattcgtccagccctccatgcaaatgccagtcccttgtgttctcagaaaatgctagtaactttcctaccacaactgcctttgatagtttaattatccctcatactataatttttatttgagggaggtagggcacatgcaatggacaggatattgaatattctgccaagggtgctgagttttaattctggttctgccactaaccaattttacagccttggaaaaataacatcctctcttttgaccgcatttcctcatctgtaaaatgaaagagatgaaccatctctctcttggtcctcttcatcctctacgttgatggataatgaatgatgtgttttcctcacaataatccttcataagacagatctcaacaataactcaccagaatgacactttacctaataattgctgtttgagaaatggacaaccctagttccttcaatctttaatttttctgcatttctacccataaaatatagtagtaatgatattctaataatgaaaactgccaaaaatacaggatttaacaacttgtaaagtttatttgtataaatcttctcacttgatagtcacaatattcagatgatggaggtagcaaagatttgttaattgtcccctgatgtcatttcttttgtcttaaataggtccctcattttttatcttgacccatggccacctgaagtaaagcctatctttcccagccccctaccacagttaggcgtgacacctctctacgttctggcagaagcaccgttacaattttcagaaaggcccttaaagagaggcaggcatgcatatctttcctccttcctttttctttctggctgaaatgcagactgacacgtggagctcatgtagatcttgaaccacagggtagaactgcacgtggagaatggcgaagcaaaaggataaagaaccttgattcctagtgactccatgcatctgctttagcaggctctggaattctttaatatgtgaaaaaaataaatttatgtttggtttcaataactaatgcttttatttacttcacttgcagcccaaataaattctaactgacacaattatagaaattattacttttattttacagatttaataatttgctgaaaatttcaatggggctaaaatttgaacatagggcacttctgacacctaagcccaacacacttcctacttctctctaaatagataatagtaaccattggcaggtgtaagctgaaagacaaaccctaatggaacatccatcagtgattagaacatcgcaggagtagctcatgttgtcctccacatagaaaaacattcctatgacaaattagagtgaacgaccgtctctttagaattgagtagatattggacaccacctctgtaaaggactcatattctccccaaagtatctaagtaagaactaggaggaaatcagaatgcagtatcagaaatgttaggcaaatgatcaaaaagtaccacgttaccaaggttgctgtgaggtgcatttcaaagcctttaagaaataagccaagacttcaaggggaattttttaggaaatagaaaaagaagtccttatttctcctcccacaccccattctctcaacccctccatatcagctctagttcttttggtttttgtctgttttcatttttttaaacacctggacaaatcttatcacttccagaaaatgaagggatggggaactcaaccttgcttctcactgtgctgagtgagcccccagactccacattgttggcttagcttgtagtgttgtgctctgacagcccttagcagctgaagcataaagaatagaaataatatttcaggattttattaggactattaatttttttctcttgtagataaaactcttcaatatttctaacagtaatactattatcttagtatatgaatggcacctatgatgctcaaaacagctgtgatagcccattcactatgaacagcagagatggctgaagcccattagttagctcagcttttcataacttaagaaaaacctgccagccatgtatccctcacttctacatattttataataatggaacatttttagataaaatcataaataaaagatgctgctgagtttttgaacaatgcattatatgttttgtattttattttgactttattttttcacagcacaatcataactacatagatgattacagttgtatgttcggagaaaaagaggagagagaagactaagactcataggaaagaatcctgcttttattaatcattcatacatattttcatttatgttttgaaagccaacaacataccaggctgtctgtttggcactgtaagtaccacaaaagcataatacaataggcctttctctcatggggcctgtagcttgaaggtgaatacagataattaataattaaagagtaaaatatgccattgtctacaacatgagacatacaagggaacatatttagggttccttaattttgttaagaaggaaggaagagcaacattttgttgtgggtagatagggaaggttcctcaaggaaatgacagctaagctatgacttggggatgataaaaagagggacctcagaagaacacacagcatgggcaactttccaggagcctcttagtggaatcacaacaggatacaatcctagggctcacatggctgccttacccaaaacaggcaaaacacttccacttattaataatttgtttatccactcagttatgaaatattcactcagcatctaatttttgccacacactgtgctaaaattttagagttaaaaggatgactaagatatggttcctaccctcaaggagcaaccggtcttgtcgacagaagccatacttacacagatttacgatatgagggctttagctgctaataatcaggcacaaagagggcacaatgtggtcattaaaagacaagtggttacaattttgaggtgagaggacaagaagttagtgggtgaggggatcaaagaacagggaaaggaagtcaaggagaaaagtccaataaactctgcatgaacaagtacacagcagggctacaccacttctttctccccttctccttcctccttttcttttctccccctcctcttcccctccttcttttataaacagccaacttccaaacttcattagttttgttgggacatattgttcccccgaaaccagcttcttttagatgttctgagaaaggatgctaattaatgatggtgctaccagaaggtttctatttggaattcattagactcaggatagcagatagcacactaagccacattagagacgcacatagagccactgtctggtgggggagtggatagtaagattactcagcctgaagaagagaaggctggaaggtaattcaataattgtcttctaggtgaacacaagcttttgttgaacatcctccatgaagaggtcctactgatgtttagtgtgataaggggtggggaaagacaatagtttgggaaaccagttattaagccactttagtagtccatggagaaagttccaagagttcagagtagggggaaaagagatatgaaggaatgaatgaagaaaacacattgcagaggtataaagtaatccctggatgaaataagaagggtaaaggagaaagaactagaaacagaaaaacatttatgactatctcttccaagctgatggtggccaacggtcttacaattccatcaactgaagatggaacaggagaatgacttcctgtgccctggaaggtaatcttggttaaaagataagaatcagtgggatttgccctgataagaagagttgctggaaattgaaataagatattctaaggatgactgaggagtcttcttggagatctttaagaatagggctgtcttatcagatttcagcaccgagaatgctcttcagaatgctgaaaacagctagctgagcagagttgctgacatcttaacatctttttcctcagctttttatgctcacaccctggaagcatgcgctatcctgcttcattggggaatgaagtgtatcaacattttctgtgggtccagatagagcaggaagtaggagaacagtgggtgaactagtctcaaaataacataccctcatttctctcaacagtaatatcttcagtctgaccgataccaacttcggttttcttgtggaaaaaataaggatgtggtaagttcagacccttaacattcgagaaaaccaaacataatgagctactggtaatcttctagatataaatccacctattacctctggaactatgactgactttaccttgtacctgaaattatcttctctttttcattgaccagctcctcctgggcattcagaatccagcaggaacactatcgcctctatgaaccccataccagcccaggctaagtaagatgctgtggtagattacattttccaaagatggctacaccaagatatatcctgccccacatatccttcttataccatgacactgacacgtctccatcaagagatgagatccttgttcccctaccttgacctgggtggacctttgtaactgcctcaaacaacagtgtgacagaagtgcatgacctctcagatgtatttgtcggggttttccagagaaacagaatcaataggatgtatgcgtgtgtatgcatgtgtgtgcgtgtgtgtgtgtgtagagagagagagagaaacagagagaaagaaggagagagagagagatttattataaggaattagctcacatgattatggagactggcagttcacaagatttgcaagggtgagtcagtgaagctagagacccaggagagccaatggtataggttcagtctgacgaccagctggtccaagaaccaggaggactcaatgtttcagttcaagtccaaaggcaggataaagcttatgtcccagtttgaaggcagttaggcaggagaaattctcttttacctgggtgagggtcagcctgtttgttctactcagaacttcagctgttggataaggtccacccactttaggaagggcagtctgctttactcagtctaccaacttaaatgttaatctcatccaaaaatactcttctagaaataatcagtcaccctgtgacctagtcaagttgacacataaaattgaacatcacgtaagactaagtataaaaagcagtatgacttctgtctggttctctctgtctctctctttatctctcgggataattgacttgggaacccaaacaccatgttgtgaggaagttcaggccatatgaaaaggccatgtcaagatattctgggaaacacctttagctaggcccccagttaatatgtcacacatgtgagtgaatgacccttccaataatttcgtccctcagccttcaaattttctagcaaagactccagatatcatgtagacaaactaacctttatgtgccctgtcttaattcttcacccacagaaaatgtgagcaataatacatgatttttcttgcttcaggccgctaaggtttgaggtaaagttttgcacggtaatagaaaataaatagtgataccatcttacatggtcctacatatcaacttttaatgaaaagatagctcttatcacactatgtcatcattccatttactttaactattgcaagattgggaattctcagatggctaggaccatgccatctcaaccttttctctttgttttcccagtcccaagggtgaacagtgctttctggagttgctcttatttgccttttcacatccttaattcctagtgaatgattctttatattaaattatctctcttaaaataatgtgtggtttctttcttctgactagaccctgattgatatggtggggatggaaattattactgtggcaaagctgggctctgagatttggccagagaaacctgaattacttccctccctcttcttagatttgattacttatctgaatattctgatctttgagatcaagctctaccccactggctctataactagatcttgagaccactctgaggcatctggtgttcttgagactttatttagagaagataaaattctgtcgtatgagaaacacttcgtttagcacatctttttgcctagttcatgttcacaaatatctatgaaaccctgacttccaggatatgtgctgaaaattcagtaatgactaatgcccagtccctgcccctgagaagtccactctctagaaggatgactgacccataaatggaccttatcactctcacagtgtgataagagatgcattgagccccaggacagcgggaaagtggtagtacatcctgtgtaccttctccctggctccttggcttcctctttcactacctgtcctcttgtctcctttctcaggccattcctgagagaacagctgtgggaagaggagtggaaaactagataaccttcccctccacctccaaataatttttgtctatctatgattcaacctccacagtaaagtgtttgttcaatgtggaatgtgccatttgaacatttcatctcaattttaaaactatttcagtgccttggggtctgagatttacttattccttcattcagttgtttcttttcttttttttttttgagacggaatttcgctctgtcgcccaggctggagtgcagtggcgcaatctcggctcactgcaagctccgcctcccgggttcacgccattctcctgcctcagccccccgagtagctgagactacaggcgccctccaccacgcccagctaattttttgtattttcagtagagacggggttgcaccatgttagccaggatggtttcaatctcctgaccttatgattcgcccgcctcggcctcccaaagtgctgggattacaggcgtgagccaccgcgcctggcctcagttgtttctttgacaaatatttagtgagcacctaccacataccaggcactgggccaaacacgaggaataaaaatggggaatgagatacagcccaggcctgaaaactctctctgttggttgtatgaccctggtaaaatcacaaggtctctaagttttggtttctttactagaaatgaaggtaacaccactgacttcacaactttgctgtagagattaaatgaatttatgtatctgaacattctgcagataaattgggctgaatttaaaataaaatgatgctacttcatattcattgttatatttaatatattcacttcatttaaaaacctgtttcactgaaatcatttaattacaacttcatggtaaaaaaatgaaatttaaacattcacatctggagttccttgtgacaatgggaaacgttggaaaaaactgtggcttaaagtcaaattaaacattaaaaaaggaaaatcacgtgtatataattgatgaatatttctcacatacctatctacatctcagaccccaaatctccacagaatgtaagatctctacactgacatttaaagcctttgcaatctggccttgactaaggagatttgataacatgataccctttaattgtcacaataaatctatgaaataggcaatactcctgttgtacaaaccagagatctgtaggctgagatactgagcaacttccctagccccactcaatgtgtaagtaaaatatctgggatttcatctttaaattttaaactctgaaatccatgagttttctttatagcatgaggcatttgtcacagaaggcactaaatagatacattatcacttaaaaaaaaaagactaaatctttcaaccattgtggaagtcagtgtggcgattcctcagggatctagaactagaaattccatttgacccagccatcccattactgggtatatactcaaaggattataaaacaaaacatgctgctataaagacacatgcacatgtatgtttattgtggcactgttcacaatagcaaagacttggaaccaacccaaatgtccaacaatgatagactggattaagaaaatgtggcacatatacaccatggaatactatgcagccataaaaaatgatgagttcatgtcctttgtagggacatggatgaagctggaaaccatcattctcagcaaactatcgcaaggacaaaaaaccaaacaccgcatgttctcactcataggtgggaattgaacaatgtgaacacatggacacaagaaggggaacatcacacacccaggcctgtcctggggtggggggaggggggagggatagcattaggagatatacctaatgttaaatgacgagtgaatgggtgcagcagcacaccaacatggcacatgtatacatatgtaacaaacctgcatgttgtgcacatgtaccctaaaacttaaagtataataaaaaaaagactaaatctttggggtgttgtacaaagacaatctgtttaagaaaccaatttgccatttgtcattagaaatttcatagggcttttacaaacttaaacagtttcttaggtttttgttggttggaattttcattgtaaatactcagtgcagttaaaatagaaatgagccatctttctagaggtaaagaagttcccatatttaccaataacaaaaacacataatatttatctagtttataaaaaaactacaaggtcaggtgtggtggcacacgcctgtagtcccagctactcagaagactgaggcacgagaatcgcttgaacccaggaggcggaggttacagtgagccgagatggcacccctgcactccagtctgggcaacagagcaagactcggtctcaaaataaataaataaataaataaataaataaataaataaataaatacgaatacaaccaaatgaaaggcatgctctttattttttgtgagaatgttttattattatgagacattctttttctcggccgggcgtggtggctcacgcctgtaatcccagcactttgggaagccgaggcaggcagatcacgaggtcaggagatcgagaccatcctggctaacacggtgaaaccccatctctactaaaaatagaaaagattagccagatgtggtggcgggcgcctgtagtcccagctactcgggagggtgaggcaggagaatggcgtgaacccgggaggcggagcttgcagtgagccaagatcgcaccattgcactccagcctgggcgacagagcaagactccgtctcaaaaaaaaaaaaaaagaaagaaagaaagagacattctttttctctgtttcattgagtgtgtgcacatgtgtgtgtgttatcaccaattttgctaaaggttaatctatgtagtaactgacaaaaggtggcagggcctaatgaagtgtgagtacatcactaaccagaagacctgctaggaatcacacagcaaatgctccctaaatcacagtgagtaccatgtagaagatgcaccagcaccagcacagggaattatctatttttccaaaaccattctagtgctattttccccaaggctaaaaatgagttgattctgcttgctgtttgtagtttcttttctctaacaatctacagcaaataatgtacttttttttttttcttgacaccaaaccggcatccttctcccttgccttcctctgctttaggagtttcaaagctaatgattagttttccatcctcttttgcatctagtagtaaccagtgacacactggccattaaatggccattgagatataagcagaaatcaactgagcagtgttgtagggacaaaattttgtcctttaaaaaaggattccagacatggatgatacagccttctgcccgttacaatttttcctgcctaaaatgtcgatacatttggcaattctgtcaaattctgtgtccagggggcaacaaccatgaacacaaaaatgcagaaagctctctagggaggggagaaaaaaggtaagaaagaatctgggctcctggtggtgatatggagcagctgacgcaaaccagaaacttcttgttacatgtgaaaaaccctatttgtttaagatcctctagcctagttttctgatactcgtagctgaaaatattcttagcgggtacagggatgcaatgttgattgctatgaagcctatgacataatggatgatgattataataaaaatgagtcaagaatagtattttgaataaaaagatatcactaataatataagtaataattgtaacagtataaagctccacaatacatagtaatgaaaaaaatatgactataatagctgagaattaataggccactggctactattatgataatgactgtaggagtaaattgaaaacaggttaaaaggacaatgactgctgaggttggggacacatatacaaaatggacatgcaactggtctttaaatgaaacatttattacacagaggtatgtcacaaaataggacacccatatacccagcaaatatataaaactgtccatcttcttattcataaaaggtatgcagattaaaatcccattgagacactactacatattcaccaggatggctaagatgaaaaagacaggcaatataaaatgttggggaagatgtggagcaatcagaactcctacatgctactgctgagagtgcatattggtacaaaccttgtagaaaactgtttgaaaatctctactaaagctaaacatagtctcgcctatcacattcctaggtatttatccaaaagaaatgtatccatatgctcattgaaatgatctacaagaatgtttatagcagaataattcttaatagccctaaactggaagcaacccctatgttcatcagcagtaggatagataaatcaattgtggtattagccatacaatggaacagcatacagcaatgataatgaacgaatgactacatgcaatgccatgaatctcgcaaatatagtgttagatgaaagaagccagacactaaagagcacatgcggtatgatatatatttgcataaaagtcaaagataataaaaaataatctgcattgataggagtcagaagagtggttactcctggcacagaatgaggggcagtaaacagaagaggcaaaagaggaattttggaagcgctgttgatgttctgtttcttaatctggatgctggttttacaggtgtgttcattttctggaaatttatttagctatacagttaggatttataaaataaaaataattaatctgaaaaatttatcagaggacattcctccaaagaaagacttgggcaaaatctcatgctgattagatgattcaaataacaagaagacattcttaacccgtttgctataaggaaataagatattccattaagaatagatatgctacaactagatggggtatgcgcttatctctatatacagaccttccaaacaatcaaatacagcaagaaggaacctcattcactcatgcaatgaaatatttagtgccaatcaggtgccaggccttgttctaggttctggagattcaatgacaaaggtctcaccctcatgacacttaccttgccctacccttagtatttgaataaataacttctaagaaattgatttgtttagtttggaacattccattgaaagtacaactgacgctgtctcctattgcattgatatcgtgcgtctgtttcatttggtaagcctactaacttaactattagtgaactgaatctaaaagtgcataagggtgtgtgtgtgtgcgtgctagaaagagacatactcagagtgtttgttagtttgtcagtgagtaaaaatcacatggagtgtatgagattgtctaagagacaaaactgtgattaaagtgaatgaaatgagcatggaactctatgggagatatatgaataaggatatacataacaaggctgaaatcatgcaactaatgtaagtgtgtttccattaatgactttttccctaagcttctctatccttccccaaaatctcaacacgtaaaagaagccagctgatttattcgacattaacatactctatcttctatgataaattaatgggaaaatgctggcacataagcaatctaattcaggtttaaggctgtatcagggttattctttattcaaaggattaaaccctcagaaactgtcccccacccctcctgaaacatcccttcctctccccactgagtgctattgaacaccatctgtgctaaaaagtttccataattcaaagcccatcggccccctatgatgactacagactccccttctcaaaaggtcttttaaaaatagaagagatattatcttctgggtgtatggcttaggcagagctctagccaagaagatgatgacccctttataaggtcctactaagaaccatttgtcattagaattttcaagctttggagattgggaattggattcccctgttgaggtcagacctttgcacacagcataattttccctttctagacagtgttattctctaccttatatacctggcagactcattaccaaagatctacttcaagtaatatcttctctataaaaatttcctgggctcctcttcccaatgtaaagttgaatatgctttcccctgaatcccctacccaaacctttaaaaaaacattgattcatacatctctgtgtcccttttagaataggagcttcatgaggacagggatcataactgttcattctcatatctcatgacaaagacggtccatggcatatagtatatatatatatacatattttttttttttgagacggagttttactctgttgcccaggctgcagtgcagtggctcactgcaagctccgcctcccgggttcacgccattctcctgcctcaccctccaaagtagctgggactacaggcgcccacgaccacgcccggctaattttttgtgtttttagtagagacgggttttcaccatgttagccaggatgatctcgatctcctgagctcgtgatacgcccgcccgacctcccaaagtgctgggattacaggcgtgagccaccacccccggcggcatatggtagatatttaacaactatttattgaatgaatgtcagtgaccaggtgatgctatcaaaattgaaaatgatgactttccccaaatcacaatgaagtgggagctgaagtgaagccatccaactgcctttttaaagatgaggtacattctcctggccagatcccttgtgaaaactcatgccctgtctgagactcagagggcttctttaaaagctttctgtaggagagatgagcagagacttgaatgtattcaaaagagctcctgggaattttacctctaactctgatcagggagataaagaaaaagtagaaggcagatttggggttaaattgaagagaaaaataaacttatggaatgcatgtacattgcaaacattaagtaccattctttagataagagagctgagaaataggttgctttgaacacaagatgcgttataatagatttttctttgcttagccaacaagttggcccattgttaggaagatgtttttgaagtataacagcttaatttctaggttgcactctaagaaaaaagtagcctctgccatctgggagctgacttagtgctatcagcctggccttgtactgcttgaaattggcccggtactcacagctgagctttagtgttttctgtgaaacaaagaaaatgttcacagaacatcaacataaggcaaggacactccatccccatgatgaagaaagacaaaaaccagactgttccacaatcatgctggagccagacaaaaacctgaacgctgtccaaaacacaacaataaccaaacatctccctatcctggttaaaatgagtgattgctgcttctttaccaattatacctttagctttagccttggcctattctccccttcttctagataagatttattaaggtactcaatcatagaattgtcctggcctctcaacaacttctaatccagaataaagctgtcctttgttaaaccttccctaaaccactaactcaaattctgtaagttctttcctaaactctttgactaagatatttcacagttccccatgaggtgtattctccccgtggtagtgagcaataaacccaacttgttcaattataggtgtgttcttggtggtctttggctggaaggtattgacaattctctaatattattattcactaaactacaatctggcttctccaggatgccagagtttaacattaaggtattaaactcttttgcttaaactccacaagtctgtcgtattattatattttgttgttattctataccacctcagttaaataaaatatttcagaaatctccagagaaaatggcagaatgaatcgtttttaagaactgagaaaaagggaaaaaacaattggagcttctatttccttactccccttacgtaagagagggaaacagccttccgcagttgtggtgaagtggtcaaatttattccatgaaagcaatatattttctaacatccttaactcatcaccataatttctaccagttctctgcacacaaagatttctccatggagctgtcacaatatttttcttcctactaagaataccagagtgctttttcttctcaagttcttcttgtgttgtataatgtgacaggttattaaatcaatttctcttcctctctttaaataaggcacagcaccaagtacagcgatccttcagaattaacactgacaacctagagatgcttcaattcattcttcagttctaatacacacacacacacacacacacacaacctacatctctctcacaaactcacacatactgtataatatgttaataagttatggtttaattatattagtattttatatgtgtcatattatattatgtaaataattaataaacttcttaacataaagataattttggaagaaagatacaaatgcaattagaatcatttaagtgagctcaactcatgccaagccaaggaagtgttcattgtatgactgaggcaagagtcattgagtctaatattaaactataaagatttaaaatattgtttaaagaactgccttatttgcatttcttgtagtaacacattggtatgatcgttccagataggcagttgggtaatttgtaaagcttacccaatatgaatatcctttaacccagcacttcctaacaatcatatttcacttaaatatataaatgataatattgatgcctaacagctatataatggtgttagacactattgtgcattaaattcttatagcaactctacaatgtaagtacttttattgttctcattatttattagcttggtacaaaagtaattgcagttctgctctattttttttttttttttgagacggagtctcgctctgttgcccaggctgcagtggcacgatctcagctcactgcaagctctgcctcccgagttcacaccattctcctgcctcagcctcctgaggagctgggactacaggcacccgccaccacacctggctaatttttttgtatttttaatagagatggggtttcaccatgttagccaggatggtctcgatctcctgacctcatgatccgtctgactcgggctcccaaagtgctgggattacaggcgtgagccaccatgccaggccagttctgctctactttcaatggcaaaaaccacaattatttttgcaccaacctaaatagatgagaaaatggaggtaatttacttctacaagaacttatagcctataaataatagagctggaactcaaagtatagacagtctgtgactgaagttacactgtaccagtactccatattgtctctcaacattggaagcatgttcatggtagaattattgatgcaacctcaatctggaaacaacctgcccctcccccagtgttacccatcatcattcacccaattgctcatccctctggaatgattcttgactcctcattttctctcataccttactttcaattcattagcaaagtctatggggtgtgcttttacaattcagctcattttcaaccactgttatcttctccatggctattacctgatccaaactaccagtgctttcacctggacaaatgcagtagcctcctgagtcatctccaacatgcacttttgtctctccacacgatctatcacaagcagttgtactttcatcctccaatggcctcccattacatatggaataaaaccccaaacacttaccattgcctaaaaagccctacataatttgaaccatagctgcctctatgagatcattttctctcactcttgctttcttataccagtgcctcataacttccctgcctccttgctgcccttctttattattgtggtaagaacacttgagatctaccctcttcacaaaattgtaaatgcacaatacagtattgttaactgtaggcatgatgttgcacagaagatctctacaactttttcatcttgcataactgaaactttattccttaaataggctaagcacatgcccgtgtcatggcctttgccctttattctgttggaatactctgtccttatatacaaatggctcactgcttactcattcagatttctgtgcagatattcctcagataagtttttcttggtcataatttttaaacaagcccccctatcattcactaccccatttcctgctttatttttgtttcacttaccattgtttaccaatgtgttacacatttattgtgtattttctattctacccactagcacaaaagctgggaccatgtattgttcccttctgtatcctcagcccttagaaaagtgcctggtaaataataggaattcaataaatgtttactgaatgagttaaagaatgaatcacttatgtgtgcaccactatggactggtaggtaaatcacggttcatctacaggatgaactgcttctggccattgaattgcaggaaatatttattagagttgtaaaatgtaattgggaaaatctcaagtagtagatggagagtggacaaggaaatgaccaaatgtcagagatggagatgcttgtttagaagtaggtgtctcccacagcaatgggtacactagtctctaggaagggggcagaactaggcatggtgggcaccagcaggagaggactcatagtgtgaccacaggatctgaaatctgaagtcagagtgtttcagagagcaggttccgctcatattgactatatgatcttggaaactgatatggtttggctctgtgtccccacccaaatctcatcttgaatggtactcccataattcccacgtgttgtgggagggacctggtgggagataaatgaatcatgggggcagtttcctccatactgttctcacggtggtgaacatgtctcacaagatctgatggttttatcaggggtttccgcttttgcatattcctttcctctctttgcctgctgctatccatgtaagatgtgacttgttcctccttgccttctcccacaattttgaggcttccctagccacatggaactgtaagtccaattaaatctctctcttttgtaaattgcccagtctctggtatgtctttatcagcagtgtgaaagtgaaataatatagtaaatttgtaccaagagtggagtgttgctgaaaagatacccaaaaatatggaagcaactttggaactgggtaacaggcagaggttggaacaatttggagtgctcagaagaagacaggaaaatgtgggaaagtttagaactttctagagacttgttgaatggctttgacaaaaatgctgatagtgataggaacaataaggtccaggctgaggtggtctcaaatggagatgaggaacttgttgggaactggaacaaaagtgactcctgttatgttttagcaaaaagactggtggcattttgcccttgtcctaaagatttgtggaactttgaacttgagatagatgatttagggtatctggtgggagaaatttctttttttttttttctgttgaatattaagatttattttaaggttataaaaattaagatagtatagtattatagtaataataggttaatagatgcagacccatgcaagtattatttgatttatgacaaatacagcacctgttgcagtgggcaaaggatggtgttttttgttttttgtttttcatattttaaattttttttaatttttttatttttttattattatactttaagttttagggtacatgtgcacattgtgcaggttagttacatacgtatacatttgccatgctggtgtgctgcacccactaactcgtcatctagcattaggtatatctcccaatgctatccctcctgctccccccaccccacaacagtccccacagtgtgatgttccccttcctgtgtccatgtgatctcattgttcaattcctacctatgagtgagaatatgcggtgtttggttttttgttcttgcgatagtttactgagaatgatgatttccaatttcatttctaagcagcaaagcattcaaaaggtgacgtaggtgctattaattcagttttaaaagggaaacagagcataaaagtttgaaaaatttgcaacctgacaatgcaatagaaaagaaaatcccattttttgaagagaaattcaagccagctgcagaaatttgcataagtaacaaggagccaaatgttaatccccaagacagtggcaaaaatgtctccaggacatgtcagagatcttcacagcagcccctcccatcaccagcctgaaggcctaggaggaagaagtggtttcatgggctgggcccagggtccccaagctgagccgtgtgcagcctagggacttcgtgccctgtgtcccagctgctccagccgtggctgaaaggggccaatgtggagcttggaattcaaatatagacagtctgtggtgcaagccccaagccttggcagcttccacgtggtgttgagcctgcaggtacacagaagtcaagaaatgaggtttgggaacctctgcctatattttagaagatgtacggaaacacctggatgcccaggcagaagtttgcagcaggggtggggctatcatggggaacctttgctagggcaatgtagaagagaaatgtggggtcatagcccccacacagagtccctactggggcatcgccagaggagctgtgagaagagggccactgtcctccagaccccagaatggtagatctactgacagtgcactgtgcacctggaaaagccacagacactcagtgccagcctgtgaaagcagctgggagggaggctgtaccctgcaaaaccacaggggtggagctgcccaagaccatgggaacccacctcttccatcagtgtgacctggatgtaacatggagtcaaaacagatcattttggagctttaagatgtgactgccctgctggattttggacttacatgagccctgtagcccctttgttttggccaatttctcccacttgaaacaactgtatttacccaatgtttgtacccccatcatatttggaataactagcttacttttgattttacaggctcatagacagaagggacatgccttgtctccagtgagactttggactacggacttttagttaatgctgaaatgagttaagactttgggggactgtcgggaaggcaggattggttttgaaatgtgaggacatgagatttggcaggggccaggggtggaatgatattgtttggctccgtgtccccacccaaatctcatcttgaattttactctcatgattcccacatgttgtgggagggacccagtgggagataattaaatcatggggacagtttcccccatactgttctcatggtagtgaataagtctcacaagatctgatggttttatctagggtttctgcttttgcgtcttcgtcattctctctttgcctgccaccatccatgtaagatgtgacttgctcctccttgccttctgccatgattgtgaggcttccccagccacgtggaactgtaagtccaattaaacctctttcttttgtaaattgcccagtctcaggtatgtctttatcagcagcatgaaaacagactaatacagaaatattattatgacatctctgaatctcagttctctcatctgtagaatggcaatgaaaatactgacctcagtaggctgtattgtgaggaatcagtgaaaaaacaaatgtaggagggctatgaagatactagctgtttttatttcttcttcttctctattatttccagaggtggtagacttcactttgtattttcttcttgttgtactttttcaggccatgcatttcctaagtttaatgttcagggtagaaagtccttccttttcaagccctacatttgcatctttcaagcttctgagaaaactccctcaataagaattggaatgtaaatatgcctatgttcctcttatccacatcctttaaactaattatagaacctatgacaataagatgggctccttagttaactaatgtttccaggtatagtccatggtttaactatgtggcaaaaagttgacactcttcttattaagaaggagggtctatgtccttaccctgagagattgccatgtaggtaagttcacttgtaggtgctccaactggaagtcctagcctaacacttgggtgaagatgccttcacacgatctgaaactctggccaataaattatccccagccttctggtcctctcagctgaggtcctagacattgtggaactggaataagtaatccactgtgttctgcctaaaatcctgaagcacagaatccatgagcttaataaaatggttgcttcaattcaacctattacatttcagggtaattgtcacataacagtagtaattggaagaaactagattaagcaaatcttcaattgaggtaggctaaaatatgctccccaattacaaatcctagtttctccagaattcagtttgaaaagaccaacattgatcaaagtaggggaaaaggtaacaaaattttgttcctttgatacacagtttcaagaccataatctttcaacaggaactagtctttgggttaaaaaaaaaaagtctctaggactaactactccgacgaaaaggagctcttgaaatatagtatttgaaaacagactatccaagatagggagttgaacatttctgatcttaaatcaagataaaatatttaattagcctataaactgaccccaagaacatctggagtttccagaagggaagaattttcttgttacttctcttctaaaactgacaaacagtgggggacaacgttggcacagaagcaaagatgggaagggaaggttatcagtatggcttctctgagatttcgagtccgtagattagagaacacagacaagtggaatgaagttgctccaagtctatttatcttcttcaaaatgcagagagtggaggggataaggagacttagataatttcccactaggaaagtcgaaacagatcaatcaaagtgcttagtaagaaacttggcagacacttagagaattgttaaattttcttactaaaatttctctattttacaaagataaatggacccaagaatacttgggttggccagcagaccaaaagcttatctctggcattaaacatacctcgacataagtattatctgataatgtcttttacatactgagaactaagtgatccactactcacattagttttacatgcattatctccctttaatataaaagtattgaatatctattaagtgttcactatgcaccagctactatattaagtaattcataagcatcatctcaatagatccttataataaacccatggaataagttctattgttgttaccttcattttactaatgatcaaatgcaggcatagggaagttgagacatttacaaaaggtcacatggataagccaagcagtgtgattccagggcttatagcatcagccccttcattatcctgttagccaattatttaatcttgacaaccattcagagatgcagtaatataaaaggctcagagatgttaagtggctttcccaaggtcacacagttaacctgtggtgaatccctgccttgtttccaaactgacctcagatcaagccaggctgctacaacagcctcctaagtcatttagcaaactaatttcaggttgaatgaaagcctggtggatcacactacaaatagttaagtttcattctgagataaaccagccaagagtttatttttcttcttatgccactttctgaatttcaaatattttttagtaatgaaaccatatttcccccttcacagaaccccaaaatgtttaatagttttgagtggtattttagtataacttgaaagttctgtcatttactgtaatgtcaaccaatggcaacacaatctgagaattagtggcatcttcactttaaaggcatctgtgcctttaagtgtatgtgttgtcacatttacagttagctgatcttcgataagggtgccaaggacacacaatggagaaggatagtctcttcaataaatggtattgggaaagccagatgtccatgtgcaaaagaatgaaattgagcttttatctcacaccataacaaaatcaactaataatggattaaagacttaaacataagacctgaaactgaaaaattactacaagaaaatatagaaaaaaattatcaaaattgatttgtgcaatgttttttaatatgacaccaaaagcacaggcaccaaaagcaaacatagacaagtgagatagtgtcaaaccaaaaagtttatgcgcgacacagaaaacagttaatagactgaaaagggaatctatgatatgtgataaaatatttgtaaatcatatatctaaaaagaattaatttctaaaatatataataaactcataaaacacaatagtaaaaacacaaataacctgattttttaaatgggcaaaggacctgaataggcttttctccaaagaagacataaaaatggccaacaggtatataaaaacgtgcttaacatcactcatcagcaaggaaataaaaattaaaatcacaatgagatatcacctcactcctgtaagcataggcattattattttttttttagaaaaaaaaaacctaccattagtgagattgtggagaaattagaacccttatacactgttggtgggaatataaaacgctgcagccattatggaaaacagtatggcggttcctcaaaaaattaaaaagaaaactacatcttattaatcaatcccactttgggggtatatattcaaaagaactgaaatcaggctcttgaagaaatacctgtattctcatgttcattgcaacattattcacaatagccaaaatatggaaacaatccaaatgtttatcaacagatgaataagcaaagaaagtgttgtataaacatacaatgaaatattacctagcattgaaaaataagaaacatctattatttgcatctggaagacattatggaacagaaagatatgatgctaagtgaaataagccagtcacaggacaaacactgcatgattcctcttataagagacatctaaaataatcagaaatacagaagttgacaaaagaatgatggatacccagggatgaggagggggcatacaggaagttgttgtttaataattgcaaaattacagtaattcccagagatgtgctgtaccacatagtgcctatagttaataataaggtattgtgtacttaaatatttattaagaggacagatctcatgttaagggttcttagcagaaaaacaaacaaacaaaaacccaaagagacacaaggaaacttctgaagatgatggatatatatatattttttatctggattgtggtgataccagtatgagtgcccacacatatccaaacttgccaaattgtatacattaattttatgaagttttttttataacaattacacctgaataaagctggagagaaataaaatttaggtatgtgggttgttttctgttacatattttaaatattaaaatatattttagaaaatattctataattgggatagtggttgcacaggtgtatacattaatcaaaactcatcaagctacgagttttttttttaaacttttgagttcaggggtacacatgcaggtttgttacacaggtaaacttgtgtcatagggatttgttgtatggattatttcatcacccaggtattaagcctagtacccattagttatttttccttatcctctccctcctcccacctttcaccctccaatagcccccagtgtatgttgttccctgctatgtgtacatgtgttctcattatttagctcccacctgtaagtgagaacaggtggtatttggtttcctgttctggtgttagtctgctaaggataatagtctccagctttatccacgcttctgcaaaggacataaccttattctttttatggctgcatcgtatttcatagtgtatatgtaccacattttctttatccagtctatcatcaatgggcatttgattacatggcttaagcaagactgatggctgactagaattacctggtgctcatctcacctccacaaaaagagacaaaaacaaccaataaacaactacttttcaactagaataactgaagaagtacactgaagggcaccatgggaatggcaaaaaatctctgtggagtatgaaagcccaggataggaccgtagagagggaggcaaagagtctcacctctgccacactgtctctcctgccaagattagctcagagttcacgggactccatcttacaagaaaaaaggtaagctggagatccccaaacagtccccactgcccctataaaaatccttgctataggagagattctgaatcctcacagttcccaaattcagtttgcagagtatccaatatttgcatagctgcattgccaccaatgtggaagccagcttaactacctcttaccctcatgatctaagctgctacagctcggtgccaccttgaaaccagacccagaaatgctattcttcagaaatgaaggggaaatacagacctttccagacaagcaaatgttgagggaattcatcaccagtagaccagccttacaagaaatgcttaagggcatgctacagctagaaataaaagaacaataagtactatcatgaaaacacatgcaagtataaaactcaccagcagaggtcaatttataaattaaactcagaataccccagtgatataatggtgctatataaatctcttaatcctctactataaaggtttaaagtcaaaatagtcaaaaacaacaaaagctacatttagtgactaaggaacacataatggatttttttaaaggtaaattaaggcaacaaaaatataaatggagggcagagaaaaaagtctagagtatctttaggcaaccaaacttaagttgtgatcagcttaaaatcgtctattttaactacaagactctttgtattagccccatggtaactacaaagaaagaaattacagcagataaacaaatgagaaagagaatggaaatatagcttagcaccacagaaaaccaacaaaccagatgaaacaatgacagagaaaggaaggaagaaagaattttaaaaaaatcagaaaacaactaaaaatagtggaagtaaccctttatccattattaacaaccttgaatataaatagattaaattctccacttaaaatgtatagagtggctgaataggttaaaagacaaaaaacaagacccagctacatgctgcctataagagactcacctcatttttaaaggcaaacatagactaaaaatgaagggatgaaaaaagatattccatgcagacagagacaaaaagtgtgtagccatacttatatcagataaagtagactttaagtagaaaactgtaaaaagagacaaagaagagcgttataataaaggaatcaattcaacaaagaatataacaattgtaaatatataggcactcaatgccagagcacccagatatataaagtaaatattattagacctaaaaggagaggtagtcagcaatacagtaatcgtaggaggcttcaacacccaactttcaataatgtacaggtcatcgagacaaacaatttgacagataaatatcagacttctactgcacaatagaccaaatggacctaacagacatttgcagaacatttcatccaatagctgaagaatacactttattctcaaattcacatggaatgttctccaggatatatcacatgttaggccataaaacaagccttaagcatataaagatcacatcaagtatcctttctgatcacaatgttataaaactagaaaccaacaagaaaagcttcagaaactgtacaaatacatggaaattaaacagcacgctcttaaacaaccaatgggtcaatgaagaaattaaaaaggaaattaaaatttttattgggatacataaaaaaatggaaatgcatcataccaaaacctgtggaatgcagcaaaatcagttctaaaagggtcatttatggtaagaaacatcaaaaaggaagaaagatttccgataaacaacctaatagtgcacctcaagaaacttagagaaacaagaacaaactaaaggcaaaattgatagaagaaaagaaataataaagctcagagcagaaataaacaatatatagactacaaaaaaaagattcaaaagatcagtgaaatgaagtcacttttttaaaaagataaaattgacaaaacctttagatagtctaaactgttattaacaaccacacgacaacaaatttgataacatagaagaaatacataaattcctggacacatacaacctacctagattaaattatgaagaaacagaaaatctgaacagaccaataacaagtgaaaaaattgagtgagtaataaaaagacatttatcaaagaaaagctcaggacctgatggccttactgctgaatcctaccaaacatttaagaagaattaataccaattctcctcaaactagtccagaaaattgacctcaaaagcacaagagaaaaaagcaaatatatacaaatgggattacaccaaactaaaaagcttttgcacagcaaaggaaacttttaacagagtaaagagacaacttacagaatggggtaaaatatttgcaaaccagacacctaacaaagggttaatattcattcagaatatataaggaacttaacattaaaaaaaataacgtgatttaaaaatgaacaaagacttaaatagacatttctcaaaagaagacatacatatgatgaaccagcaaatttttaaaatgttcaatattactaattatcaggaaaatgtaaatgaaaaccacaatgagatacctcacccagttaaaatggctattatcaagaagacaaaggaaaataagtgttggcaaggatgtaaagaagaggcagcacttacacgctattggagggactgtaaactagtacagccactatgaaaaatagtatgaagtttctcaaaaaattaaaaatagaactattatattatccagcaatcccactaccaagcatatatccaaagaaaatgaaatcagtatgttgaagagatatctgcactcccatgtttactgcagtattatttataatagccaagatattcagtcaacctaaatgtccaacaacgaatgaatggataagatagtgtgatatatttgcacaacagaatactatctagccatagaaaggagtgaaatcttgttatttgcatcaacatggatgaacctggagaacttcatattaagtgaaataagccaggcacagaaagacactgtctaatcttacttatatgtagaatctttttttaagaaagttggtatcatagaagcagagagtagaacagtggataccagaggctgagaaggggaggagagaggagtggatgagatgttggtcaatgggtacaaagttgcagttagaaggaataccttctggtgttttaatgcacagtagagtgaaaatggttaacagtaaaatgctgttttttacaaaataactagaggagaggcttttgaaaattctaaccacaaaataaatgataaatgcatgagatgaagcatatactactctgactggataattatataaaacatgaaattgtcccccatcaatatatacagttacaatgtgtcaattaaaagtaatttcttaaaaataaccattctacaaaataattttacattaatttttcatcttgatcctgagttaattttattttttttgtttttcataaactgaatatgaaaatttatactaacaaactaaactacaagttaatccatttgaaaagaaaaacctcatcaagctgaacatctaaaatgaatgcattttgatatattttatatgtaaatcatctcactaaagttgataaaaaggaagaaattgtatttatatttcaaacaaataattgcagtacctctgaagtaattaggctacctcaggacacaatttggaaaccttgaaattcaagctaacatttggtgaatcagattggagaagctgagaactgtttgtgtcccaaggttcaaataaacaatgaaaaacttcaatcctccttccaggaatttcaatggctaaaaaacttatctaatccccggccaggggatcacgcctataatcccagtggaggccaaggtgggcggatcactttaagaatgttcctactctttatcatgataattttacttctaggaaaaaaaaaaatctcaaatacagggtgattggggccagatgtcccttatatataagaaatttatcctgtaattattcataatagcaaagctttgaaaattcatatccaataatggaaagctggttcaaccaactgtggtagattttgtatgtgaaatattatacaatcatttaaaatgaggtttatgactaattttgataatatacatatatatacacatatattctttattatgaaatgataaaaagggcagcatacaaactgtagctattgtatgggcttcactccgattactatcatagcatcacaacaaacacaaatcctatgtttaacagatattctttaaaccaatactattaaatgaaaccaaactaatagcacaaacctgggagatttaagtaacacaaaagatgagaaattgaagtgcaaacaatgtacatcccctacaaaccacaaaggtgaactctaatagggaaaatatgtatgtaaagagtaaaaaaaataattgcacaagtatcaaatagcaaaatcttgtcttggcacagtttgcacagaaagtatctgagttttaattgatcacaaaccacatgaccattcttaatggagttatagaaggtattaacagaagtgaagagtgcaggtccctgatgtcattgctccactatcttctcccttgatgaaatcctccattgtacttgatacctcctggtgccacattttaagaggcatggatgccttaccttatttcaccatcctgagatcagggaccatcagcaccatgacctttatttaccttatgatcttagacattaagcataatttttctctacaaaatgctcaggaatacttgctctaaaatccatggccagaaaaatgagtgtttaattttgggaatgattaagagtttggtttaaagacaggcttaatagaagtaaatgctggatacaaaagaaggcagattcctaacgggcaggaatatcaataccacgtactccagattaacatgaaacacatggttttagatgaggacattgatgaaaggaataatttggatgcctagaaccaaaggagagaaaaacattaattttatagactagtggtaattcgttgggttattctgcctccacagagaactggatgagagaggtgcagtgtcatgaagacaacatgggtattggagacacaaagatctgagttcaaatcctaatcccacttctcactagtctcgtgacctgaacatatacatttcctatgtgaatgtcagttttctcacctgtagagtgggttatcacagtccctatcttataatactgtcatgaggattatatgaatatgcatgtaatgacttagcatatggtgcatagcaaacagtctggtactcattattctgagaggaagacagtgaaggatagcaggaggacagttttgaagtcagacagtctgggttcaatttgtcattgctccttcacttaccacttgtgtgacctggggcaagttacttaacacctctgtgcctctacactatatacaattttttttgtctactatacctcaataaaaatagaaaaaaataggctggacacagtggctcacacctgtaatcccagcactttgggaggccaaggcaggaggattgctcaaggccaggagtttgagaccagctaagcaatatatcaagatcccatctctatgaaaaataaaattagccaggtgtggtggcatgtgcctatagtcctagctagttgggaggttgaggtaggaagattctttgatcccaggaatttgagactgcagtgagctatgattgcaccactgcactccaacctgggcaacagagagagagactctgtctcttaaagaaaaaaaaagaggatggaaaaaataaaataaaatatagatgagcccaatttgcaagatagttttgataattaaatatgacaatatatataaagtgcttaggagagtacctgatacattgtttaagtactctcaatatatttaaggtattataaataaatcatcattgtcattaataaagagataaaatagattgaaattacaaaggaaatatgacttttaaggagataattatcaatagtgagtctagttaaacatgcaaataggcactcaggaaaagtgtcaaaaatacctcctttgaaatgttgaaggtgattcaatctagaggcagaagactcctaattgtacatgccctctcaaactctttctccaatctgtaattccatctttcaaatgaccagcatgggtctcaaggtacactataaaaactgctggggaccaatgctccacttgaatgcccagaatgtggcttgccagttcttcagcctaaggatgggagtaaggctaatgtcatgttttactctgtgcaggaagccagatgttattcctctggctgatgaaattatcttcagggcatacaaaagaattaattaagaggcaacacagatttcaattcaaatactttttgctcatctgtaacctgaatttcccttcttgtgtaattctgttctcagacattatgacactgaaaatgttgagattttacttataaggaatccaattagtcacatatgcaatccagtaatcttattttcctgtatctaagtgcatcacttaaaagttgaacatcatggaaccatcagcctctggtcacaggcacatgaccccaggcaacaaggagaaaatattatctggctgtaatatttgattttgttttcttttatattcaatactcagggtaagatttctaatatcaccaagatcagctttctttttcttttttgtttttttaaaaaattattcttattaaggatgtgttaagggggaggtataaagcaacatcaaagttttcccaaatgggagtctgatgcaaaatcacagtgcaaactttgtgaacaagtgaagaaaactgtcgtttttttatcatctgtcatgctgggtgttacccatccaaaccttgcaagtcaacaaagtgtgaacagaaaatcttttgagaaagaagcttgtctgtgatatccagagggaatgttttaattgacttaattttcattttctagctctcgtctatgtccacaactgggaagttaacagtgttcagggacctagtcaagtgagtgtgggagtgtagtctaaactcaaacgcctccaggggccacttttgtagggcaagtgagtgaagcaggctggctagcaggaggcacaagcacgaacctcgtattttgttaaggagggaagatgctaattatcaccagctcattgttgccataggattaaagaccccacattgccagattttctggttgcttggaagaaaccagaaatctggagttttatgaaaaatctcatgatctttgagttacggcaattactacaaagcttgttagaacactgtgaaaaccagacaaaatatgtctgcagacaacagaaaggccaccagattcaagtttgcaacctttgaaaaagcagaaataacatgggctttggaagcaaccagattccagctttactgtttactaattgtatgaccctgggcgatgtattaattctcaagccttagctatcttttctagttagtaaagcttttattgcagagtaattgtgaggatagaatatacgtaaattaactaatacataactggcatcaacacagattgatggctactttaattcatcacataaatgttaatattgcttgtcccattttcataaaagttctaggctttggagcaatggaaaattgaatatcttaggtataggtaaaattgttattttgagttttatcctcatggtttaatacatgaaagggtgctggcccactattatcccaagcatgagagaaacctgttttgttgacttcttccacaagccctctagccaagaaaattccacagcccacttctctgggcaagctcaacaacatgggcacacattatcccttctgtgctgctaacagggatgctaggtcatatggtgaccaaaccctacatctgggtaggtggagtggggagggggaagagaaaatgaaaaacagtggagggatcggaattaatcaccagaattataaggagtttaaacaactctacaggaaaaaaaatctaataatctcatcaaaaaataggtgaaagatatgaatagatacttctcagaagaagacatacaaatggcaaacaggcatatgaaaaggtgctcaacatcactgatcatcagaaaaatgcaaatcaaaactacaatgagatatcatttcattccagttaaaatggcttgtatccaaagacaggcaataacaaatggtggtgagtatgtggagaaaagggaacccttgtacactgttggtggggatgtaaattagtacaaccaccactatggcatgatttattttaggccccctccacataaaggtaacctaggcacccttgagatggtcttcctaccacacattcagggaaagaaaaagatttaagtcaagatttcatgtagtgtcctctttctcaaggtcacacgactgtctgagaccccagctctctgtctctaagatagggtgagattactggacactgaggtctttgaggacacaagccatagtgctcaatacatgctggggttaaatagctgtgttgctttttcacagagctattatcagcaggaaataacataagtggatggatattgtgaatataaaacactatatggatatattattactacaaacaataatcttgtagtagagtccactgataattgatgtgttacatataaccgcacaaatcgtcactaacaataattaccaacaactcaccaaagcccatggttcatcataacatgcttccatatggaattgatccaaaggtaggtagttttcagaattacttagagcttccaagaaagatctcaatgattgtgtattaaaattcaatgaaaaaattgaattaatggtgattgaagcaaccacctagaagtttggagtataatttgggtgttcccaatgagaacaagtactcctccaatcatagggtcactgccaagggccacacactcacgagcttgattctacccaggcatgcccaggaatagagcatatgctccagtgaactgaatataagtctttagttcataagagtccttgccttctgactgtctaagaagtgtttgtttgtaccacttgattatgatgcttagttccaggagctagtgaacacatcaggactcaccagaaagcaggaagatattatttccactcctcgatggaagatggaaagcattctaaattatcattacacttaactgtcaccatatattgccatcattacatagccaggagttgatgaagagggatttttttaaaggatatgatcctaaattaggaaaatgaaagggtatgaaatgaaactctcagtttgtaatgtatttcaaagtcaagttttttttcttccctcttttctgtcaataaaaatcatggccattattaaagatttactgtaagttttcacctaatgaaaatatttccggccaggcatgatggctcacacctgtaattccagcactttgggaggctgaggcaggttggaggacccatctggtaggagtaggagaaatagaggagttgcaggcagggctggaaatgttgcctagaagagtcctccgaccatgatccagcttctgctggatggcccagctgtttggttctgggactaccatcttctccttttgtccctgtcacccagaggagtgctggctcccttagagggttggggaaaggagagaacccttaatttgaaacatttgccagtgtctgtggtgtaaatactccctgacttgcaaaattcctgaatatttaacagtgtgctctcaggagactatataagctgactccaacacatgactgctccagccctaagcagagttcctgttgttcatccctgggtttcttcacagcccctatttaggttttcagtatttgcagcttctttgttactaattatctaattatttctcttagccacctggcatgcactttggttttattattattattattattatatccttactgtatattgttaagagagcaaaatttgctaaactgcttctagaagtaccacaatatcaatgaaccatatgattaagcatgctagcaattaagctgatattaatggttatagagtgagactttctaggtaaaggaagccgtgaatcaatttacactgtggcacaaggttcttatcactgtgcacgggtggcaaagtttgtggtagctgtgtgctatagtttaataggacgctttggaaaaattatttgacaatatgtatcaaaagcctcaaaagcttcctattatttgtcccaccagttctacttaacagaatctattgtaggaactcatccaaaaagaagggaaaatcctcaagcacaaagatgtttattgcagtattacttaaaatagggtatatctggaaggaatttcaaagtgaaaaaattgatgaatttaaatccagttgatgggatattatgcagctttgaaattacaatgatcaatattgtagcaatgtgaggaaaagcacatactactaagcaataaaattaggaaagaaaattttacaagcatgataataatcatatgagaatatgcatgccagaagaaaaagactaaaataaatatgtacaaataatagttgaattatgttaacgggttagaagtagatggatttcttgcctgtaatttccaaggagttacttttttataatgtaggcattccatttagttttgttaaataaaaaataatgagactaacaaagtcaatgagaatatttagaagggaaaaaaaagatactatgtattaagacacccatgaatactgttttatatttacattctaagccttcgataggcctgaagttaaattaagattccccaatctgcctatcagcattcattttctgtgtatgttgactcctcacctaaatttcacctgctcactaactgctatcaagcctttctttcagagaagtggctgatatcacatatctacatacaattaaacatgctgactctcgggtcttttgaaccttctttctcctatagagtggaagactgtctcttagagggacaccttccggctgcttataaacaggtgagcatagtattgaaggcttaaagaatttggtccaagggatccaaaacaggtctatttgtgctctgatcagcatggcttcaaatcccttattctgagtactttattttcttagaataagaactgcttcctctgctacatcctcttctcctccctatttctccattcacatcagctagatctttaaaaacaaggcttacttagactaggtacctagatgcaaaaaaggaaaaaaaaaacagacaaacttaaaatcagtccttatccaatttgtttggatttttaaataaacaaaaaaaacctagctgcggaattcaacctaaaatattgccacacaaaccaccaaagactgataccagtgtccagcacaattataaaatagcaataaagatctcagtttctggagctccaatgtatgggtttaaatattagcttttccacttacaagctgactgctcttgggaaaatccttaatctttttgtctttccatttccttgcctgtaaaatggggataatatctcatagaatttttgaaagaactaaactggtaatttagtgccagactagtgcctggcacttaaaaagtacccagtaaagtttaggtcatattgtttcaagttcttgctccaaaaaataaatatttcatgatgtgtccccttgttcttccccaggtaccaccattagtcagagaaacatctcgccaagtgtagcacagttgatacaaagaaccccactgtttttcctagagcttctctccactgggtccgtgatcagttagagtctagcaggcacaaaaatgaataaatccttcccagaataaactttttgtaaaaacccaagtcatctcttaacaacgtgggggcccatcgctctttgaagaatgactcacagaaatgtcattccattcacaccactgccaaaggagcagctgccttgcacaagcacagcaaacagtgtgtgttaggaaacattccaagtggatattttacacatgagtcttgggggatgtctgaatgtggttttgctaccttccaaagctggttaaaactgcatgctggccttatgagcttgtaggcccccagcccgttcctcctatttctgccatccccatctccttacttctgaatctactcatgatttccacatgcaggattcatctttctccagtcctcaaccaactcagactgaggtaaccatcccactcagccccataaacccatgcggcttagaacgagtcacttcttcagtcctgaagactgggtttaattatcgttgttgggttcccacgtggctctcttgggtccacaacaagagtttatgtttctctatagatctacgatttgtcctgggtcagctctgtccaacagtcaccctgttttgggcttggtcagagaactggacttcagtctttgtccctactcctcagttctggccagttaccctggatagtaagtagcccagcccagctcccaaaagtggagtttgcccctctactgcagacagagatttcatgggactgacttgctcatacctgtcctcttggttccctctttcaattcgggacctatggataggactgtcatctactgagctcattccatctgagtagtcacttctctctcaaccccctaaaacctgtttcctcaaagctaccattcccaaaattcttattaagtctaatctgaactctgccttggccacaagactttgtctctggaaccagtttttggaactttctcaccccggcccagtctggggtctgggttcacgtctgttcctggtcctcttgctacctgtgtgttgccaatgagtaggcatgggatgaagagtatattgtgagtatttcttggtaattaacaaaaacacctaaaaagtcttaggctcatgaattaagggtaaatgtcaaaatatccacaacatcaaaacagcaacatcaaaacatcatgatagaaatgtgatcatattcacttctcaaatttcttatttcatcaaaataaaccacctgaagatataaaatatcaaaacatttttgagccaatcatccagccatggttctgtccatttcattggacatgcctacctcaaaccactgcccatgagactgcatcttgaggatgacacaggggtctggtttggaaagggcatctctgtcagaaatgcctttgcacgccacacgcagctcaactttggtcaggcaggggctgttaaagattcccagtgtgttggcagcggactcataaatgttgctcatcttcttcattctgttttaggcaagtaaaagaataaaaaagaagtgccaatcactgcaatatttgtcaaaggagaaagcctcccaatcacccttcagaaaattgtttgacacacagtttcaaacattgaaggtatttatctcactttccaacccagtgacacagttccagtgaaacaaatcaaaggaaacaaacaaacaaaaaacaggtgctgctgcacttggttaagaacactactttcttgtatgatttgcatacatttgcatagtaaaatttttagcctgtgaaataaaattaatgaattagttcaataggctgcaaactgtaatccagctcttcaataagtgtatggcttgtgtgaaattgtacagatttgttggttcatcaatttaatcacatctcaagttttcaagactaaaaatccaactcaactcctatgtgatggcatggagaagtatattgttctttctgaagaaacagccatatttcccacccctaaaactttgccctcttctcaaaatgctctcagcaagccagctccaagacagaggcccagcatctgaatccctgtgcccaaatgcactagcccattctcacctttccctttcccactcccacctgccatatcagaattcagaatcaaaagggggaaagtgatggggaggaaaagcacaaagcttcctattctgaacttgtggaaacagcagctacatttaagcactgcaggccccctgcccatttccatgtgatatcctttattttattttttgtttttttttgttgttgttgttttgttttgttttattttgtttttgtttttttgttttattattattatactttaagttttagggtacatgggcacaatgtgcaggttagttacatatgtatacatgtgccatgccgctgtgctgcacccattaactcatcatttagcattaggtatatctcctaatgctatccctccccccctccccccaccccacaacagtccccagagtatgatgttgcccttcctgtgtccatgtgttctcattgttcagttcccacctgagtgagaacacgcggtgtttggttttttgttcttgcgatagtttactgagaatgatggtttccagcttcatccatgtccctacaaaggacatgaactcatcattttttatggctgcatagtattccatggtgtgtatgtgccacattttcttaatccagtctatcattgttggacatttgggttgtttccaagtctttgctatcgtgaatagtgccgcaataaacatacgtgtgcatgtgtctttatagcagcatgatttatagtcctttgggtatatacccagtaatgggatggctgggtcaaatggtatttccagttctagatccctgaggaatcgccacactgacttccacaatggttgaactagtttacagtcccaccaacagtgtaaaagtgttcctatttctccacatcctctccagcacctgttgtttcctgactttttaatgattgccattctaactggtgtgagatggtatctcattgtggttttgatctacaatgaactcaaacaaatttacaagaaaaaaacaaacaaccccatcaaaaagggggggaaggacctgaacagacacttctcaaaagaagacatttatgcagccaaaaaacacatgaagaaatgctctccatgtgatatcctttataataacactttgcatcccagagccccagtgatccaccagaggccatcagtgctctccttctctgaagacgactgaacgtataagattctcttaggagcaaaattcaataccttgcttatggaattctgtttctttgtagattcattagggaaaatgacaatggcttcctcaacctcacatggcactggtgctctgcagtggaatttcttcatctataaaatgggaataattcctctctctctccttcccttcttccacaaatatttagtgagcttccccttggtaccagcactacaccaggtttaactgagtacagcatgccacctcttttacaggatgatggctatgcctcagcattacgcatcacacagacacacacacacacacactcaatcacaccaatagcattttattggaacacaggcatgcttattcatttatgtatttatgtatttcacacacaagcacacacactcactcctgcacaccaatagcgttttattggaacacaggcatgcttattcatttatatatttatgtatttatctgcggttgctttcactacaatggcagaactgagtagttgcaatagagattgcaagtaccacaaagcctaaaatatttattatgtggccctcttcagaaaatgtttaccaacctcagttcccttaggtaaaaggaacctcagttcccttaggttagggaaatttgtagttttggagagttgcaattctggttttaatatgtgttgggaaattagttttaggatgagaactgctctatcttctaccaaagtgaacattaatagggactttgggacatttgttttttacagatgaaaaaattcaagctcagagaggattggcagcttgcccatattatgcaattattctaatggcagagctggggctggagtaccagttttctatcagccagcccaaagctatttttaccacaggtaaaacctttagctggagaactgttcaaatgtaccaaggaacagtggatacaacaaatatccttgatttatttcaacctccgtacagagtcatacatcccttctacttgtaaataaattctattcaaatacagaaaatgcacagattataagtctatagcttcataaaccattttccttctatttttacaagttgtgagcagatcagtcactacagcaacataggtgacagagtatacagaaaatgaaatttacaacaaagcaaagggagaaaaagaatcagctggtggaaagatggctttgtgttcagacaggtttgtaagtgtgttacaaactctctttatcaactgataagaacagcttattcttcaatcaatatcttcctgaattccgcttttcccaatgcattaactggctccttggaatctacactcctcttctgcagctttcactggcctctcctatctccaagagccatcactgtccttctaactttccctatccttataggctcatgccaagtccatctcttccaaatccactgttttaatatgtgttaggaaatacatattgtatttttacatacatattgtacataaaatactatgcaagctacgatagaatgggacatctctaatatcagtcttgattgtgaggtataatgcaaaaagactctgtcaaggagacacataattcccgattcaaatcctgactcctccattcactgaccatgtatccttgggcagggtatttaacgtctcagatggtaatatctatcttgaagaggtgctgtaaagagcagattaaataatatatgtaatgtgattaccacaataccaggtatattgtggatgctctgatagtggtagctattgttattgtgctctgacttatctccagataaaatcattcatgctttcactaccaactgaaaaactcttagatgtctcactattaagaccaaacttctataagcccatttaaatgtcttctgtatttacaacctgtacaatctgagcatactaccctccatctaagagcacacactcatcttttaaatcagtttatctgtggattcatacacatgagccaataactctcacaggttcacaagtcagacagtaaaacaatggtgacagctcttctaatattgtgaagctgctttattaacttcctgggatagacaatttattcttcaatcagtgttctttccaaagcatcagctggctctatgggaatcctatactcaataaaagccctctcttggtccatataaaagatagtcacatgttatgtgcaattcacaaggcatctgatgggaatgacaggatttccacaatgcagaggggtcaattgtctcatcctccctcatttattcatttccaggttgttacaacagttttggttcacatgggcctggttaaatgaatttcagatgatgatatttagttttaactatccctacctctccaatggattactgcaaagaaatcttattgaatgtaaaaaaaaataatgtaggcaaccaaacaccacgaaatagcagaggtgacacatttttctcctagtctgaggttctcgttggccatcatacttgcttataatagtggcaatcttatacatgtgtcaatagttgcccaagataattaaaaattatcaaggcttcttgaaatatggattgatacatgcaatcactgataggatattctatatcaagtgtatgtagttcttgctctgaattattagttaatgatagtaaatttaagtaatttataaaagaataaacatataaactggaggcacatgtttagagttttttaaatcatggaataaatgattcagaaattttatggatcacttctttaagcaacgggaaacagaggatttgaagctgggaaatgggcataatcaaataaatatttgataaagatcagtctagtactaatatgatggttggactgcaggagagaaaaaacatttgtgatcatatgaggctgttttgctgctcacttctattcctccttttcccattgattctactttcttccctctgctcagggccctaaaaggcttacctccattgactgccagcacactgttggcaagtgttatgttgggtttcactaaagggatgcagttctggggaaggggggagaaagagaacagcatatttcttccgaactcctaccctgatctttagcagtagccatgcaaatgaccatagctctatctgcaagccttcagatatcactggccttagtaacaacactgtttcctctccttaccccttcaggcttatgggttgtaatgttttcctgccagtcttaaggtgggcatcctagaagcaaagcctgaaacagggattcagatgcacttgatttccttacctcagaggagaggagagaagaaaagtgcaggaagcaaagaagtggtctcagctggagtacagcttcaatctgattccatgggggctctgggacatgaattgtacccttaaggaaagaggttcagcctatttaactccatgtgagaaagtcatgctagggatgagggggcatgaactcttagatttgctgcttcctccccttggctgaaagcaatcaggcattcccaagaaaagaggcagccatgagccattatcagtcaacacttggaagtccttgagggagggatgcacttactggataaagggcatgtaggcagaatatcattgggtctattttaccacagtggctggtctctaggaacctccgtatgaattcctttaactttgaccacaaaaccgtaaatgttcttttcattaaaatctcttgaatcaatagagatgattctgttttctgtctggaaaagagctaaactagaacagtacagctggaattaaaaattaggagtggtgtggcagacagaggctaagatggccatctcctggtattcatgccccgtataccaccctcaccttgagtatgggtgagacctgtgacttgcttttaaccaataaaatatggcaaaagtaatagaatgtcatctctgcctttatgacacctcagataatgacaccatcttgataagagactctctcccttgttggctttaatgaagtggccatgttgggaggcaaggaactgagggtaacattcatccaataggcagccagaaactgagactctcagtccaacacgctgaaaggaatgaattctgccaacaaccatgtgagcttggaagtagatcattctccagttgaacctcagatgtgacagcagccctgactgacacctcgattgcagacttgtgatacttggagacagtgattccaaataacctgcaacagtatttctgacctacagaaacagtgagataataaatgtgtgctgttttaagctgctaaatttgtggtaatattatctagcaaccaataattattaataatacaaacagattcaagaggcactccaagttgtgtgtgtgtgtgtgtgtgtgtgtgtgtgtgtgtgtgtgtgtaaactcctttagatcagggactacttcttatactttactggatccccagtagtgctcatcttggtaatatttctggtctggtgatgaagccaacataaaccttcatttctagagggatagggtacaggaaagcaatatggagatactaaagacaaaattcccaacttttcacaattatactcagggtccacagcttacctcctggtgcctgcacaaatgagagccctgacaaaatatactggagttcatgagttcttgtgcctgaccttgactttggaggtggtacacaggacagtgaaatcaaattgtttggctttggtccagctgaagctcactgctgaaaggtgatcacaaaatatggctctgtcaacgagtgatcagctacctctaggcccagagaagcggagtaaacaagtaatttcacacactgctagagaacaggattaatatagcccgattatcaacacattctccatggctgatttaaatcctctttgttgcctttcacacaataccttggggagactaatgtctgctgagaattattttgataaaagctgacttttggccaattttagaaacaaattataattgtcctttcactgagataatttaagttattaaaaactaccacttcagcatattcacattctctaacaggaaaaactgatcctgaaacttaattagtttctgaatgagttgcaaacaacacaaagacaatagagaactcaagagggaagagaatcagcttgagttcacaggggaaccaactgagcagagcttgtcttaagactgtgtcaagaataagtgcataatcactcttctgcttgccttggcattattcagccttttaaaatgtcatagtacatccagggaaggctagggtgctggatgtctctatctcacaacatttccatcacaattcaagaaacgtgtataagggatctgctatgtgcctgatgtgctgaatgctggaggcactgaacatccactcgctcaaccagagattaacaaggtgttattccactcagacttgtcaatccatttcctaggcaacattccttagatcaagaggagatctgtcttgaacttacccataggtggcaagcactgtgctggacactgtaagagatggaggcataaatgagatagtccacctgcctgaagtttcatactctggagcagtgcatctcagacttcaccatcatcacaaatcacctgggaagcaggttaaaatgtagtttctgtttcaagagtgtggagtagggcctgagattctgctcccagatgttgttgatcctgctagcctgcggactacaccttgagtaacaaggttgctgagtacaaaccaagcatctataaaacaaggcaaacttcccccagatattacttatcttaggaacagacactcgtatatgagatgcaagataacacaggggataagagtacagatctagtattgaagcatttgagtttgaatcacagctctactactgttaaagtaggtagctagtcaggcatgagaagtgtaagagagggctccccccactccatcaggaatgtcaggcgaccatcaggtgatggtcaggcagttgtcacactgtctctctaaaataataattagtcacagccagtgccagggaaaggcagtctccatagataaaaacacctgaaactggtgatcagcagcttttggataagatttcagcagttgggccagtaggctcgagcatgcatattaagagccaaaatggtaccatttaactggtatataaccatcgggggcattccactggtaaggaaagaatgcctcaaatgagcatgcatacaactccagtaaacacactgctcgtgctcccctcccaagtgctagcaggccactgtgcatgtggacaacccactctgagggaagaatcagggaagaagggacgcaagaccccagaagagtgttaatatataaaaccccaagtcaaaaggtcaaactgtgcacttgtctatcaagttgcctgcttggccctctaccaagtatatgttctttccttttgttcctgctctaaagctttttaataaactttcacttctgctctaaaccttgccttggtctctccttctgccttatgcctccttggtcgaattctttcttctgagggggcaagaattgcaaactcacatggattcactaccattaacactatttacttgttgtgtgaccttgagtaagttacttgaattctctatatctgttttaccatctttaaaatggggataataatagttcctactttgtagagttgtgttcagaattaagtgaattaatccacataaaagtcttcagaggagtatctgggccataatgagcactcaataaatgcaaattactgtgatcattgctgttgttttttaattggaccactaggttcatagaacattcttttaattcttatatatcttcccagcatttaacaataggtcatcagatcctcaggataatccttcactggatccttgggataatccttttgtaggacctattaggacacccatttccatttcataggcaagaaattgcatcctagaaaggtacaacaactgcacatagctgtccagccacaaagtggtaaagcaaggatttgaacccaggacctccaaatacagaacttatgcccttaaccactttgctgttctgcctccttataggttagctgcttaacaagactctcaaaaaagtgacaggtggggatttacaccacagaacatcttccaaaattttcttggcccatctagcttccctgaatgtcacctggtggctgtccctccccctctctgtctcctccccttctctctaagtcctttagattttagattctttcttcccccacatttcacagagagtcctttattttgtaaattaatctgccctctgggtttctttcctctcaggactttaatcattacacaccctgctcagggcccctctgctcccattttggcagtacaaacactgacttcccaagaggttgggaaaaggagaaaagctgtatatatttatatttttgtcctcatcaaacatataatgttctataattcgtttaaaaataacttgctttcgggtgggcacggtggctcacacctgtaatcccagcactgtgggaggccaaggtgggtggatcacctgaggttgggagttcgagaccagcctgaccaacatggaaaaactctgtctctactaaaaatacaaaattagctgggtgtggtggtgcatgcctgtaatcccagctactcagggggctgaggcaggagaatcgcttgaacccaggaggcggagtttgcagtgagccgagattgcgccactgcactccagcctaggcaacaagagtgaaattctgtctcaaaataaaataaaataaaataaaaacttgctttcctagctactaatattaactacagtaataaaacacactgttttatttattccttgagacaacttcttgagatcagtattgtcagcctcattttatggatgtggtggttaaataacttatcccaatgtcatagtaagtgacacagccaggaattaaacctgggtctagtggcctctgaagcctgtgtttttgaccaattcttataagatgatttgtaatttgcttaacaattactttctttttagaccatgccaaggcaaacttcaaccctattccaatcccaataaatctctaaggtgtagtgtatgtattgagattgtgctctggcagtgcttaaaaattcactttacttcctttattcccaaggctgctcaagtcactctatatgtaatggtagcttcatcaacaagttgagggtctaagaacttaaggtccctcctctgattatttcaaacactgagcatttgaggagttatagatggtggagctacaacacccagcaaacacagatacaaaccacatgaaacacaaaaggccatggttttcatgaataatacaacaatatgagtacatgaattaacaatatgacaattgtcatatgcattcaaaatggacaatatgcatacatgaatgtttttctggaacataccataccaaatctctcagatgcaataaataattacttcaatcatttcctgaactttataatttgagacaacggagagaccaaaagaaaaaatctagcagaaatctcatttcctgaaaaacaacttcttggggaaatgtgcatatggaatcagatacattgatgttcttaggaattctggccttacaattttgactctaacaatgattcataaagatgagatttctccagaaagtaactatgtttattgcatcacatttatattaactttatagcactcaaatgtttcccatcttcaggagaagaatttaatgtataagtgtaaccgaataattttaaatgctgacagaaagttttaagagttaaatttgaactaaatcgcaagagaaatcgtataaatgactatcttcttcctgtcacagcccctccttttcccggcataccaaaggcaactatagttcctgaacgagagagaaaaagcaaacttaaataatgttttattattttggcactgaaataatttactcttgtttctcaggcaactaaatttaccaagtagaaagatcaaatcttagtcttcttttgttcagttattttaccttcttaataaaatcatagtttggattcttccactagggtcacgttaacaggaagctggggggctcacaacgtggattttgtgtttccagttagaaaaaaaaaaaaaaaaaaacagagcaggattattcttatgttcaaagggagaaacgacagacaacatatgaagccagaagccagtttacttgagaaagcatgataactgatctacttatgggtcttgttctgcttccactctgtctcctttaagaattgcttcatgtacttttttaattgacatgcttttgcttagttggcagaggacaacatggtgtgttttgggaaagaagagggggttgaacagataacaaagtataaaaagaaataccttttcaggataaagagcacaatctctagttcagcattgcccagtagaaatatgtgtaatgatggaaacattctgtattggtgatggacaatacagcggctactagtaacacgtgtctattaagcacttgaactgtggctagggcaattgaggagatatatttttaattaacttttttaatttaaattgaaatagcaacttgtggctagtgacatgcactggacatactgaactactgtttgttttctttgttttttctaaagaacaaagcaactcatgaaaacaggactcttttataagataagtctgtcattgccctatttggtggagactggatgcggaagtgctcaaaagacttaacaggctcaagtttagctgctaggcttttcatcatctgccagtgcctgttgattggtggtgactgcccatcttacttgtggagacaggatgagaatgaatagcatgattcactagcaatgtctgcaatccacatgcatggaggagtgaagtggcaactcatgaggaaagaccttggggacaatattggagcaaagctctcctcagaatttctttctaacgtggcagtacctttatgtccaatgtgtaatcatgtttctgctaaaagtttccaagtgggatgacataagctttgtggtaaatgacctcgctagtgttgctatggatgaaaacaaagaagagactagaatttaggaagatgtagcatgtgagccgagtgtttttgaagttgaagagagggatgtttgaaagggaggacatgttggaagatacatcgtgtttgtcgctgcaatcagactcatgaccagctatcacagacatttgagtgatgctttggggaggaggaaagccactacagacatggaaggagtggtgtcggcatgtcaacattcatacacagacacacaccaaattcatatgttcttgctctctctctctctctctctcactctttaatagtgagacttcttcagtctgaataccaggtggggttgctttcacataacaatgtgagaaatgcatattcactgaaggagtttgacaggaatagatagaaaaagaaagacacaagatctctccactagcacagagaaacttcagagggcctcttgctgcagaagggaacattggctgaattgatcaagtcagtggaccagggcaagactgtggaagacattatcagatgagtaggaaatctggcagatgccttgtgtatggcagctgagaattctgtggatttctagttctcactgaatgtgaaaagaactccagtacaagaaaacatgcagttcccagggtgggtagagagagaccagagaaacaagcaccagatgtagaatactcacaggcaagagtaatactcatggacaagcatttttgggtaattatgtgtctgtcccagtgcttcccataatacgatcaaatttaatcctttcaagagttatggaaggtagctgttgatattgtttccattttacaaatgagaaaattgagattcagaaaatctaaataaattgctagattgcacaacccaaaaatggaggaagcagaattcagtcagattttttaaactcaaaagtgcaggattttgtgtataatgttattcttcctccccttacatacctcaagatctaggttcattttacagttcagtttgagtcccttaatgctggaagtcccagaatgtgatatcacgctcatttagacacaaaatatttatttaatacttcgagtatgtgctgagaaccatggtaggtactggcagatacaaagatgaaaagacaaggtttctatcttcatggagtttccaggctgatggagaaatgaacaggcaaacaaatatttagaaaagattaagtttgcttgttctctgccatatttccattaaaatagccatagacagactcagaagctgacaatcataccggaaaggaaaaaacaaataacaaataagcaaaaaaaaccacacgtggagtttcctctggctgttttctacagagctgtgtgctagggaactgttattctatgaggtgctaatagataatcttaaaaggaacaatggtagactttataacataaaacagtttttttgtaacaggacattttagagccattactatgttaatttgcactgtgaatctccaaaaaggagatatggtgtataatatttcccaaaattatttaatcacaaaaacacattagaagacacatgaaacacattagaagacaaatgattaacagagaagaaaaagcatttttaaaatgctagaggctaaagaataacaggtagaggcatattgcatttgggaatattttatttactatgaaaagtgttgtagggagccgaagtgagaatgcccaggaaacagtgcagtgtaggaggtgctgtctttcatgtactacactgggtgctgagcttgtggttaagtcagagttccagctctagcctggaaggtctactctaaataaatgcctgctggattcagcaacttaagtcaggtatatcaaggtgaccttcagatagtcaactgagaagtagcaaatgctagcactaagtgaatagtgaagaggattgatgagactccacttaatctgtccactggtaaatgccagctggatagatttctttccaatcctgaatgagtaaattagaaataacaacagcaacatgcagcctaagaaaaggatggggaataactagatcgtggtcaattcataagatggaatgccatatagcaatgaaaatggaggacagtttgatacacgtgccaatatggataaatctagacataatgttaaacaaaataggctaaatacaaaacagtacatgctgtatgatcccaattttgtgaagttgaaaaccaggccaaatgataaaggcagaacaatggttaccttttgtgaatgcaatgatgggagggatacaagaaggcttctggagtgcagaaataaactacatcttgatttaggagggtttgctttgtaaaattcacccagctgtatatttacaatgtgtgcactattctgtatgtttgttgtactcagataaaattttacttaaaaagtaaataataggtggcagaaatagcgtcaacctatataatatgttattgatcatgaagaggtaaaattctcttactaaaggaccaacacccttttagattatctttaacatcgaactaggtgatacttataaagaaaactataataagcaagtgaatcagtgaatatatgaattttttaaaatagacaaaatttaattaaaagaaagcagtaatagagataaggcaaaagctaaggaaacaaacctcaaatgagtcagagtcacttctctcattctccccagcctggatccattgtaatttattcctcattgcagtcagcaggtgtgagttgcttagggatgtttggcaaattgttaaactcaaatctgatcaggtcactccgctgcccaacatccttctgtggattcataaatgctgcaggccaaagcctacatttcttagcctagaatcactgatttttcctacctttattgatcaggcccactattctccagacactgtaaattgctctattctcattttccttctcgtactttcaagtcctagaaggcctatggaattatatgtagatttattaacatgaaaacatttttactcgtttatttctcttcctggcccaattttaatcccttgacaaaattttcacgacctcccccttacctttgttagtcactccttaatttgtgttcctacagttctggtttagctttctctcacactaattatcacttacatgctatagctattagtttacatgtctgcaaagtcctagtggctaaggatcaaggactgtttgacaaatattcaaggcaggacagactggaagtggagcctcctaaatcaactgatgacagatatcttgggtgtgggggtattttaaagtcagtggttattattttgaaattttctataataaaaacattttaaatacaaaaaaaaaaatcagtggcttcagatgctgataagaaaaaaaatctccggaaccaggaactaggcccttaaaatgtcagttgacctagaaatataacaaatatgatctatggtgtcatctcagaaccaaatgttctgaaacaaatgttcatcatttgtttgtcaaatctcagaaccaaatgttcatgggtgtaagactccaagcatttcatctagaagggcactgctcctcgattctccttcctccctctccgcaaattgagcttgtcactgatactgcctcaaagacagatttacatggtaaatggctgaagctaaagaagatgtctgatggtctggtatccttacagtggtatggcataaccagaagttaagctgttgagcagaacaaaggcctcctgtccacacctgatgggctgacaacattgctcccacacagttgacacttactgggtggcaccaaagggtgggtgacaagagtgacaactttgcctctgcatctcagaaactcacttcccccaagaagaaatgatgtcacttctgggcaaaaagcaccaaactattcctacttccaccaccaactggattagaacaccagagtacgttctttaactctcaggtctctcagactccagtcttagtgtttgtctatttcactggaggtgaacagtccaagtagcaaataagtttcacagataactggaaagagatgttcatagtcatagatactctctctttatccctaagacccctaaaattcaacttattgattacctagcgcctaccatatgcccaatacttgatcgtgtgccatgaggagctctgaaataacaaaacgtggtcactgcctttgaaaaactttcagagtgatcaagtacatgaaatatttattcaaggaaggaactagagtatgatatgtaaatgtataggcttttttaatcagatatcctgagttcattttctacctccatggtttactaaccataatgataggcaaggtgtactttggtttcctcatctgcagaatagaactaataacaggattcaccttagcactgttgtgaggattcagtgagcaacaatgcagatatagagcatagagtaagtgctaaacaatcattatgttactagggttaatataaaagagagttctgcaagtagatacatgatgaatcgtcaaagtaattagcaaagaccaagtcagtgatcacaaagcccagagaagatagacatgctttggtccaaactagagagaagagagaagagaggtaatatttatcaagcaggctctttttgatataatttcaacttttattttagattcagggggcacatgtgcaggtctgttaccggggcatattgtatgatgctaaggttcggagtgtgatggatctcatcacccacccacattctgagcatagtacttaatagtcagttattcaacccttgcccccaactagtagtctccagtttctattgttgccatctttacgtacatgagtacccagtgtttaccttccatttacaagtgagaacatgtggtataaggttttctgttcctacattaattcactcaggataatggcctccagctgcattcatgttgctacaaaggatatgattttgttcttttatatggctgtgtagtattccatggtgtatatgtaccacactttctttatccaatccgctgttgatgggcacctaggttgattccatgccttcgctattgtgaagaacacaagcagccttcttcatgccagaactggtttagtggctttacacagaatcatcactacctcatccataaactaagagagacaggtcttaagctaaagccaagagcctgatctaaatttggagaggctaagaaaagaagacaggaaatgcccatctgtatgaccagttatcaaagaatggtgaaaacatggaaacagcatgctgcatctggagggcatgagatgctcaaatggatgagtatcatttgggtgctacataacatatggttgaaagtgctttggaaattcacgggcattaatttgttaaacattctctagttgtgacataacttctctgttcctctgttttcttattctaaaaagaaagatagtaatagctacctcccaagactattgtgagaattagaggagagaatagacataaaagaagcaagcataataacaaatatagtgtatcctctaaaagtgttatgtctgtttctatgtctcctgtcctgtggtctagaatatattaatagcaaatgcccaagtgcccacacttaaagctcagataatttgaaagaactatgatttaaagataaataattattatagatcaagactgtaaattaaaatggttcatgttaaaagttgtttgtatattttggtttgggccaaaacctttaaaacaaataggtttaattataagttggaccagttcattgaacatgtgggactctttggcaagttctgtaaagaaattagctcatgggaggtttaaaaatgaattaactttatttttacttgaaagtcagagtttagttcaatgaaaaagcctgctacaaataacttttgctttatcgtagtcctcttttgtgctgatagtattaccaaagaaacagaggcaaaaatgtgtgtttgtgtgtatgtatgtataaaatattgtcaccaaacattctatctgctccctcaggactcttgcactgtgcagagagatctcactagttctgagaatgtggagcagggactataaggcctgtgagaggcaggggatgtgcagaaaatccaacagaactggctgggcgcagtggctcacgcctgtatttccagcactttgggaggccaaggtgggtgggtcacttgaggtcaggagtttgagaccagcctggccaatatggtgaaatcctgtctctactaaaaatacaaaaattagctgggcatggtgatgcatgcctatagtaccacctacttgggaggccaaggcaggagaatcacttgagcctgagaggtggaggctgcagtgagccgagattatgccactgcattccagcctgggtgacagagctagactccgtctcaaaaaaaaaaaaaaaaaaaaaaaaattaaaaaaaaatagaaaaaaaaatccaacagaaccaaagaggggtctggggtaaaagatgcctcatgtgggctagtggctcatgtcagctaagccccaggccctaagtaaaatgactcccataccaccccaaggttttctttctaatcctcctctctccaccaaaagtaagacccagaatgagagactaaagggaccaaggggccagtggctgccttattcttctctgaatccaaaagaccaaagggaccctcctgactcttacgtggcccagcttaattcaacagaacaggagactcaagagagattttggtcagtggttcaccttgtgatagtggctacttgcagggtcttccagacattacgtgtcccctggggactcatcaaggacagtgaaagaacaaaagtcctgtactcttctcatcagaagtatagctaacgatagccacatgacatatcttgtctcccttacagctgctaagtccttatttgtttccttccctggataggtattcatcttcatcccccatcccaacttccaaccttatcagtgaagaaggagtgggagggataaggcaagagaagcagaaactgagtcataccactcaattcagccgtgaacttagctcaagcacttcaccaaatatcatagacatcatcatagaaatgatttaatgtaaatcacaaaaattaccaaacaggagagtgaaaggatctagaatgtaaagaaaatactaaattatcttgaaatgtgtatagcagtggttccaaaactttgctgcacccaggaatcacttggagatcttttaaaaaaaatgctggcacctgtgttttatctcagatattctaatttaaatagagtaaggcttgaatgttgatatttttaaaaattccttaggctattctaatatgcatcaaaatttgaaaaccactagtatagaggtgtgtctagaccagtaatagtattttcagtccctagaaaggatgtaatagaaacaatggtgacataaactatactttttggctataaaggaaattaaacccctaaactaatcagtgtaaacgtgagtgttatcaaccagctgatggaatgacttggtgacttatatgtccctggggctcaaacagcaggatcacaaatgcaacatgctctctgttctccttcagctcccacctcttctttggtttttccaaatggtactgtaaccttgttagtagcaaccttgaagcacagcttaagtcaggacagatcctgtttttcaggcacaagcactgattgcaagatttttctcttcacattgaatttttctgtgaattcatcttcataaagaagtttcactctcaaaacctgtggattccttcctctcgtcattttgagattgctaaaagtctctctctctctctgattctctctctcttgttctcatattctctctctctctctctctctcataattttgtactttccttttgctttggatgcccttctcttcccccttgcactctacacacacacaaacccacacaacataccacatttcagctcaaacatctgggtggccaaggagccagagccgcccagagtcattcctaggctgagttggctgtcccacctcaatgctctcctaacaccctgggatcaccgtgatgtcagcacagttaggtcatttgatcaaattcatcaagtaacttttgcctgctttctccacaaaaccataacctccatgagggtataggccctccatctttccatctgtgaatttccatcaactagtacacaacataaaaaaataaacttaccattgtgctcaaaagattctccttggagaaagaaaaaagatttgtacccttctgcctgaatgacaaaatttggtttggggataggggagaaaaaaataggaagagaaagaagagaaaatacatcaatgtattcttatgatgtggccaacactattctaaaatacatacatgtgtaaatgcctcgaattcttgcatcaaccctctgtaggatgcactaagacactcctaatctagaaagtattaagtttctgactgggcagcctccccagggctacacatcaaatgaacacttgagaaataaacataggcattctgacttttggtgactagtcaccatattatcctgcatttattgagaatttcagggaacctagggacatgagacatattttccaccttcctggacaggagagtgagaaagtcagaaacacaattgattctttcttctctgcagatggaataaagagactaatagaaacaaacacacaacacatacacacacaatttaaacttactatacacaagttaaataaaacaaagtgtaatttttaaaggtaagtaataagatggccaactagcatgagctgttgggctctctctgatagaattaaccatggagaatttagagaaagaagaggcaggtgtgagtcagaggggttaacaaaaaaattgtgagaaaccccaaggtgatggaatgctggcagtgaaaaactgggatggagagaaacttttaactgtctttgctgtcttccttctgagttagcctgtgacaagcattgtaaaaaaacaaagacaattcaacaataaacatttgttgatcgaagcggaattactagaaccgacacactaagaatttaagatgaaaaataataatccttgtaacaaataaatttgaaaataaagatatgaacaacatgaaatacgaaaacaattataatgaaaagaaacatgtggagatataggaggatataggagaataaaaatgtcagtaaaacaagaaaagtttcttgagaaggggaaggaggagatgaacccagaaatgaaaacttatatccctgagtcagttaccaatccgtggactttccaacagaggagcacactttgatgttcagctattttaagtgggaatgaattattttaaagttggtacctgcaaacctcactaagcaaaatgtcagagactgataatcccacccttttaaactcagtctcccaattttgagtgagaaatgttccatttctcttctgtctccaaaattcctttaataccctagagaaaggtgactatttgagtcaagtcttgaaggatgggttgtagttttaaagcaggcaatagaaagataaaaagcccactggagagatggaacagcttgggcgaaggagtaggggtctgaggatggggtaataagagaggggtacagaattgagttatagaattagggtgtgggagagaggaaggagcaagacagaacaagctggcctaaaggaccttgcatgccttgcaactaacaatagctagtgccatttactgaccacctattaagtttcagtgacttttatttataatttactatcttatttaatattcataacaaccttgcaaatagtcatcatcattcctattttacggatgggtaaattaagattcaaagaatcttttttgttttctcgtttgttttttggttggttttgttttgcttttcagagagtcatgcatctgtctgtcatcaaagtcttgtgtgtttccaactgtgttggctaaaatacaaaagttatcatttaacatccctctctaatctttcagtggatcccaggcactttcatgattaagagcaaactccctaatatagcacacagagcccttctcccatcacatctccatgtttctttccttcctaccactacaaatacttgtctttcactcactcatgtggctcaattactactgtcatgacatctcatgtcattgcagagttatttatctgatcctactccagactgggtgctcttggaggtcaagggtataccttttttgtatttttaccccattgccaagttcagtgcttggctcaaattaagaagccaatcaatttttgttaactgatgaattaatcaatcaatcaaagaaataatctttttgtcccctgtgtaaaacaattatccaaatacattcagcaggacagtttatcctctgttcttagttttaaccagagtttcatttttttctctgcctgtctctacttccctcatcgccaccatggttttctggctttgtctttgtagcaggacatagaagtagctggatcatgcttgagagaacactcattcaaggacaaccttagaaataggcaagaaaagtagttttgatattttttctatttgcattattgatgtcattaactgtatatatgaaaaccgctaaagaaaattggatgtatgcatgagataaaagcctagagaaaaatacaccacaatgttaatgttaatttctttcacagtcatgggattataggtgattttaatttttagcattgcgaattttggtattttctaagttgtaaataaagttttctaggtttttaatgaacatgcatatattacttttatatcagagaaacaggaaggattatgttttaaagcattaagcaaaatgtgtaaacatgagttcttatatgatatcgctgttcaaaatccagaataagcatgtattaattataccataattaatgtataccatatccatgaattacagtacaggttatctaaaatttacaacagtcctcttttcttaaaaaaaatgcagatatgattaggattgtatttaacacaaaagctttgtaattcctgctttaaatctacttggctataaaaattttaagggaattttatcgtgaaagcagcccaaatctattcaaaggagcaagcctttcaagccagtgacccccaatgcctttttttctttgccattcaatagtgcaaatcacccatctgttacaaacaggaacctgaaaaagcaacaacatcctggcagtgactagccttaaaaaccattcccaactctacctccagacctgacgctgtattcaagtgaatgtgcctgaggtgtgatcaccacaaggaaacagaactgtgtcctgtctatgcctatacttggccatgcttgttagagcaaacatcctgaagtgaccactgtgctgtccacaccccagccaggcaagactggtatagatgggagggtgtcaggcctccaggcatgtgctaggggaagctgccatttgagaagcttttgtttccctgacacctttgtcgggacatgaaaaatggaagggaatgagcagcagctggctgcttctgcattgaagcctggcttctgatatttaccataagtgaggaggctctggatggtgtcctgtagagagggctagtcctaggaatagctgaggaaaagcagatctagatagtcttttaaactacagttgcaaagaagccactctgatttctagatcaaggtcccctctccatcaaggaggccttgaaaagagagaaatgtccctgcttctgggctggttaagatttctcagttcagtgaggtttaaattttatgtatcctgtcatcttctcctcttctcctttcttcatcaatcatcagtccccaacttgtcctcaccaaaaaaaaaaaaaaaaaaaaaagattttcagatcctgtgttagaaaacaccaatcatttggtggcagcacttacttgctgctcattcattcatgccagataagtagaacagataccaccttattacaaacactaagcccactagggactagagatcccaggtaaagaccaggatttgaatgatctttggtacatcccctccaaaactttttcacccttcttattccttcttggggaccccctccagtttgagactcactcataaaaatctgtctgctttgggcttctcttttgttgggaaatacataaaaaatcagcagtctcacgtctgatttctgccccttctccatgtcttcacagggcctctgttagacagtgcccttggcctccaagggaaatccctcacagatctgcaaggatctgccccttcagcaaagccccaaatgctgttctttcgcacattctccctcccttatcaaaattcacccccttctgtgtcccattcttttctgcctacctctatttttggaaagctcaccaactaattatccattctgtcaaaagtgagtacccctgtcaggggtttttaatctttaaaggagctctcctggagatgcaaagccttactgctattgaatgaatctgcattggtggtattggctgcctgacaagattctgggagcagagaacacttttcataggaagtactattctattgtgtatcaatgggcaatcacttgagcaccatgtataagatccacatgcaggacaggtcctcttgtctgcaagtgctattacaaatgtactgtggagattttacaagtaggaacttaagatgcatcccctggaggtcttgccagcagcgagtgacttcatttaattcaatagatagtcatgttaaagtattggcactttccaatggttgttaacaagaggtagtggaaagtgccttaactttctaatcagaaagcattcatcctgttgagtcaaggtcctcataggaaatagatggcacaccgaaattaggatgagtgtgatacagcagaccatcaagggacattgcagtaacccatatgtacaaagggaaaatagaaggagacagagcccagaggaaaagggtcatatagaagaggctaccttgagaagatcagtaatataaccagctcagggtgaccttgcagagaaaggggcaggggaacgtacaccctgacctcattctttcttccaatcttctagttggatttccaatttaaaaaaaacaaaaactggaagccaaaggactcatttattggtgtgggtatctatgggacagatgtataattgtgataataaatgtgagaatatctaattgcacaactgtccttggtacattttataccaagtgcaatgtgagtgatgcttcctggagtcctgtaatttggtaatcctattaagcgcttagtacagtgtctgccacatagtaattgctcagtgaatagtaactcccttccttgtttcagttggaacagactcagttgaaaagttcccaattatatgtggttctctttgggccctcacatatgggagcttaaagaaaaatgctgccaccctttagggcttctttcccttaagtagcaaaggacttattgaatagtggggagctctcacacctgattcctataactataggagtttcagaaacaggtactttcaaaatttctacctctcttcacatgcctgcgcctctcataaggtgctatgagataagacaaatgaacttttgcaaagtgagaaagaatgagctcacccttacaggatggtaagggtgttgatcagaaatatttctaattaatgcataggtcaatacttcatacaggaaatatcactacctgatattttagcaaagacaacttacatttactcattccccatcaatttcagtcagggaagtttccgttatggtaggaagtatagccaacaaaacttgctctcccgattagactggcaggatcttttgcaatattgctcttgaaactcaactaccactaaacaaaattcaacctcagcatacaaatactgcaaacatgtttcaagacaggaaatgaaaactatttcactgaagacaaaattggtaaacccattttattaaaaagtgaagaaacagctgaggtcttctcaggaaggcgaagattaatctcattttcaccagcaacattctttttcaaagggaattgtgtccataagagaacaacattcatacctaattgtcttaatagtaagcatcataataatgggtttggagactgtgttttaggacttcctttagaatttatgttcatatgacttctgtggaccaaggaaagttgtgcaattaggtatccttacctaattgcaattatgatcacaattttaagagacaaaaaatagagtcttccccttatatcacaaagaacatttatgtcccctcccccatttcatccctgtctttgttttgctctacctctttacaacttagaaaaaaaattccaaaaatcagcctaaagtcagttggcacattttttgtccctaagacaaatgcagggcatagtgaacaaaggggtcgcacaactgtttgaccttggagaaattactttacttctatgggcttcaaatttcttacttgtacaataaaggtttgggttagtgctataaggtactcgccagttctaatattatattattctaagaaagagaaaacaatctccttggttcttacagctccaagtttattgaccttcaaaacacttctagtttggtaccatgatacaagtgaacaccaaccatatatggctataactaccacagtgaaaaggcaatgtttcccatgcacatagcagtcaggggacaggaaaattcatgggctttcctgaatgatgtggctagctgtgaatatcagaaagatctcacatgtcagctaataggtttggacaggaggacaggaggtctccaaaccaaaggtcaacagtgtaaacagaagtatacacatgctgacaatttgaaaggcctcattaccataaaatcagctggttcagttccaaggtcacagtatagaatcctgaaaggaaacctggctatctgaaatatgacatattatgccattaaatacctctgtgtcaaagtgagcccagcctggattccttttcaatcatccagtcaacatatatcaattgaggtcctgctttatgtcatgttccgtgctaggtactcatgattaagtggaacacaagactgacccggacccttatggaagagacagatgttaaataaagaagtgtatgaatatatacctacataactggataaaggccatggagaaagggtaaacagcatgatgaaatattataagagagatacccttagggatcagaaaataattttctgaggaaggaacatttaagttgaatttggtacatgagtaggagtcagccaaataattgatagaacacttcaagcagaatgaagagcacgcactgggaggccaaggtgggcagatcatctgaggtcaggagttcgaaagcagcctggcaaacacggtgaaatagcagaatgaagagcatgcactgggaggccaaggcaggcagatcatctgaggtcaggagttcgaaaccagcctggccaacatggtgaaataccatctctactaagaatacaaaaataattagccaggtgtggtggtgggtgcctgtaatcccacctactcgggaggctgagccagaaggatcgcttgaacctgggaggtgaatgttgcagtgagccatgattgtgctcctgggcaacagagcgagactctatctcaaagaaaaaagaatagcatgcaaagtcttcaggtcaacatggctgacacactgagaacaggaggaatgtgaagcttgagaggtagccaagggttagatggtaccttgtggactatgttgaagattctggattttaagggcaatggtgaataacttgacatcacgtgagttcatcatgaatcactctggatcagtgtgaagaatggattgggaaagaggaaggatggaatagaagagaatagagaggaggtcattacagcagtcaagtcagaaaacgacaaaatcttggactgaagcagtggcaaaggaaaagaagaaaagggaatatatttgaaaagcattctaggaggaaatttgagaggcttcgtgaaaagtggaatatgtatgtgtagaaaaggaaactcctgtgctctgttggtgagaaggtaaattagaacgaccattatggaaaatggtatggaagttattcaaaaagccaaaaataaaattaccacataatccagcaatcccacttctgggtacagatcctaaggacttgaaatcagtgtgtctaagagatgtctacattcttatattcactgcagcattattaacagtagccaagctatgaaattaattaagctaggtgttcatcaatggatgaataaataaaggaaatgtaatatatatacacaatgggatactatttatctcctaaaaagaaggaaattctgtcatttgtgacaatattaatgaacctggaggacattatgctaagtgaaataagccacgtacagaaagaccaaaaaaaaaaaaaacacatgttctcacttatatgtgaaacctgagacaatcaaactcatagaagcagaaagtaaaactgtggttaccagacgctaagggataagggaaataagatgttggtcaaagggtacaaaattacagttagtgagaagagaaataaatgaaaagtatttttttaaagaaaggaaaagtggttatgtgaatagaacatgagagagatgaaaaaatatgcctacgtttatagtgtgagctgctagatatatggagcttcttttttctgagaagggaggcactgcaaaggaagagatttagggtacagagatggaaatcaagagttctgttttgatagaactatgttaaatgctgttatgagttattcaaaacaaagcttcaaaagtaactatttgaatttaggaagacgattgttgactttaacaagatcagtttaggtggagttagcaggtgaggaattttgattggagtgaatcaaaaagtgaggaattttgattgaagtgaatcaaaaaatgaatgagagataagaaagtagaagcagcaagtgtacaaaaatattttaggatgtttgttataaaatgtcactaaaaggtgcaagatcaagggaaagtattttattttttaatcatactttaagttctgtgatacatgtacagaacatgcaggtttgttacataggtatacatgtgccatggtgctttgctgcacccaccaacccatcatctacattaggtatttctcctaatgctatcactcctgtagccccccaccccctgacaggccccagtgtgtgatgttcccctccctgtgtctatgtattctcattgctcagctcccacttatgaatgagaacatgcagtgtttggttttctgttcctgtgttagtttgctgagataaagtatgacatgacagggatacaggctcctaggataacccagttaggaagcagagacaaagctgtgggagctagagggaatacctactaaagcagggggaatgggtgaagtctggagtacctaaaaaggcattggctgctgattagaaaagggatgcttcttccattaatcatcaaggaagaaaatgcaggtaagtctgtccatattgtgctggaaaaagggagatttcctatttgatggcttctatttcttctgtgaacagaaagatgtcatttgaagaaggttgggagaagtttagagattttaggaggatgtaaaatattaataagtattttgtgataaagaaaaaattcaataaagaaattaaataacatattttggcattactgagggcccagatgtttgttggtgcttatgaattgacaatgataccatccttcccccatgtgtgatttttttccagcggtcttgagctagctctttgaatgtcagcaagtagctgggttcagtttggctgggatcaggcagttgcaatggattgagagtacttgcaagagagagattaagtgaaggccatggtatattatctggatagaataaaaatgaaacaggaaggggctggtagaattgaagaaatcaataacttggacatctcaacaaggtaatagaatcactgtatagagatatttgagcaagtgatctggaaagtgggatgttttaattagcgatattggaggtagggttttgtattaatgaccaaagccaagagtaggaaagacaaatagaataaatggggtagaggagagaaaaagttgctaaagaaggcaaggagccaagaaaatgtgaggcccgagtcctttttggcatgattaattaaatgaaacattttctaggataatagcagaaggcaaggggctaagtaagactgaacaaggccttcaatgatcaaaactgtatgaccagaagattcagggagaagatagtatgccttggtaatgtggctttgagaaatagcttctgcttgaggaggcataagggaaagggatatcttaggagttcaaccaaacgtcaatctagcaagctggaagacaaaatatttgcagaagttgaagagttagaggtttatgtttagaaaattctaggaagcatcaactataggctttttgtaggggagagggcagtgaatggggtctttatagaggatatgtggattcatagaaggatatgaattctcctttaagcattaagaaaacccaggaataacttaaggctgagacagacaatgtacagttcagaaccatagacctcgtcctttgttttgctttgttttttattttggcagaaatagtcttcagggcttctgatatgctcattgatgcataaatcaacacttttgttcttctcatgaaaatcatataaaagtaataaacaattttttaaaaactcaaactccatttttactgggactagaagacgaatttaagctacagaaaatcaaaacatacaaaagagctgccaaaagcagctcagagcaagcagaagctgtcctgggagggaaaaaagtgaataaatagacttataaaggaactcaacactgatggatttcctcgtttgtaagtgagggttttacctgaagtgcagaagacatatcccttttttgcaatggatgggggtggggtgggcagagctggtagcagaagccctgctgtactaaatctggttgagagaagatgagaagacagtgcacagacataataagatgagtctgtctatgcagcagcagcaaaggaaagaacccttaagtttactctggactctcatcacctcaaagagaaatttcctgtgcatcactaattcaggaaaatcaaacttttgctcactgaagagcaataaaaagtgaactggcacagacatgatacaaagaaaatatttttaaaatgtggaaaagagcaaaaaaaaaatcttacagacaaagcatagttcttagaaaatgtcatggacatatgaaaattgtgatgaacacattttaccattagctttaaaaatttaatgaaaccatcccccttgtcttctaaggaagacaatgagcacaaatataagaaatcagacaatagatcgaaaaataacaagaagaaaagagttggtagaaaccaggaaacaagcaggaagggaaaaaaccagagacaaaggagaaattttaaaagacactagaagagtacataagacagcacagtaaaggacataaaaactaaaaatgagaaaagcaaaaaaaaaggcacataaagataaagaaagaaaaagtaattaaagattagagagacaatgaaaaatatgagaaaagcaaagaagaaccaacctatgcataatcagtttccaatgaacaaaactaaatgaaagctaaatgtaattgtgaaacagaataattaaaaacatacaatcaagaaataaataaataatcctgaaataaaagcattaaatatattaaaaatttactgcatgtaccaagaaatgtatacaaaaatagtcaatactgagacatgtcttagtaaagtttatcacacgctctaaagaattgcctaggcaaccatgcaaaaccatggggtataaatcagacttgcatccgatttttctacagagaaattctccactgaaatacaatatagcaacacttgcaaggttttcaaagaatgaaattaagagctaaagattttaaatacagccaaactgtcctttagttataaaggccactgactaatatttttgaacatataggaattacagatatattgtaatttggagtctttcttgagaaaaatactagaggacaattatgagatgactgaggaaagtatggcaaaaaaacagtgcactgaatacatttaactcttcaaataagaccaaaataaactgtcagtattagggtgctgggacagaaacaacactctaatgctgatatgttaatatcttgactgtgtagatacatgcaaataacagaaattagatggggaaagggggaaaggagtttaaagatggagtaagattgctaatttctcatataaagcatctgtcagtcaaaccatatcatttaaaattgaaaaatcaaataataaaatatagtcacatttaacaacacaaagttaaccaataagaaacgtaatatcatttcttaaaatcaggtagaaagagagaggaagcagaagagggaaaaaagtcaggatgcttccttgtgactactaattgatccttgtaagataaataaaggactaagggtattaaattaatttataattatcaagataatactcgaataaaaatacagattttcctaaagaaagaaagagctgaattgtaaaagtgtttttagaacttgataaaaggtcaggtgcggtggtttacagatataatcccagcactttgtgaggccaaggttggggatcatctgagcccaggaattcgagaccagcctgggcaacatggtgaaaccctgtctctacaaaacataaaaaaattagctgggcatggtggtgtgcatatgtagtctcagttactccggaggctgagatcggaggatcacttgagcctgggaggtcaaagctgtagtgaactgtgatcgtaccactgcactccagcctgcgtgacagagtgatatgctgtctcaaaaaaaaaatcattaaaaaaatttttaaataaaaaaataaacttgataaaatatccaacaattagggagacttaatataataaaaaatgtctcaaacaataatgtattagtgtttttacactgctataaagatactacctgagactgggtaatttataaacaaaagaggtttaattgactcatagttctgcatggctggagaggcctcaggaaacttacaatcatggcagaatgcaaaggggaagcaggcaccttcttcacaggcagcaggagagagagagaagggggaaactgccaaacacttttaaaaccaacagatcttgtgcgaactcccgcactattaggaaaccggcatggtgggaaatgcccccatgatccaatcacctcccaccaagtccctccctcaacacatgaggattacaatttgagatgatttgggtagggacacagagccaaaccatataaaatggatcaggtttatggggaaattcaaagggcatatcactcaagtcaggaataagacattgatgcttaccatcacaactactttgtagcatattattaaatccaaactatactaaaataactgtcaacttccaaaacaaaacaaaaacttgtcaatatagcttgctgttgatgctatgggagaatgggcactctcttgcaccactaatggaaatgcaaattagtataaggcttatttatgctgggagacttagcaataccattccgaattgtaaacgcatataccctttgatccagcaattctacttctctaaacctatgtacaataatattcatcacagcaatatttgaagtagctgcatattataaacaatctaaaatccaacaatggagagttggttaaataaggtaatagtatatccaaacaatggaatacaatgcagctgtcaacaacaacaacaaaagaataaggacgacagtttgtgttgcaatgaagtgatctccaggatgtattattggtaagtgaaaaaaaatgaagcagcaaacaataaacagtgaatgttatcttttgtgtaaaaaggaagaaaaattttaaaaatgtatgtatgtttgcttgcacacttatgaagaaaaggagaagttttaagaaactattaacagtgtatattccgggaagttggaagagctgggtggatgtgtagggtggaatatctgtctgtttgcctaagattatcctgatttcccccagacagtcctggttttcacctgttgtttaaaaccaaagtattacacttaacactctcaaaactttctcagtttggatgataagttaaccattaagttgtacataaactggcagccagtgacagcacttacaaagcacttactcggtgtcaggcacagttctaaacacttatatattttatccccacagttcatcctctgaccattgctgctatagtcagtggctcatcttattctgattcaagctggcaggattgggccagtcaaaactgaacatacagtagctatctttcataaggtgcttcctgcatcctaagcacgttcaggtaggtattaatagtattctcattttacatgtgagagaactgagcacaaagagttggagtaacttgccctaagtcacacagccagacaagtaacaaagctggagtttgtgctcatgtttgtccccaaaatgtgtgttttgtgttacctgtttgtgtgcatttttgtgtatgtgctctaaccctgtcctggaagctgagtataagtaataatattatgttcaactggcaagtgtaattccccacaactaattcatgaaattaaggcattatgataatttatataaaaaaagaaaacacaggtttgtgcatttaatgaaactttgtttccaacaatgctcatacataatgtatgaatcttctagattaaccatggctattaaaaattatccatactgaatactaaactggaaatatagtatgatgccaattatataactcatgcacacaggggagagaaataatagtggccctctctgagttgcagaagtattagtaacttgttttgtctttatatttatcagtattatttcatgttttttacattgagcatgtcttacctttcatgtataaaaagcataataaaatatattttaaagaaaactacatgaactctggtacatataggcttctaataacatggcttatagttgaaaataaataaaacaaaaagtgactctaaaaaaattagtcgggtgtatattgtttccagtataccagtggaaatacctcctagaactctcacctgaagctgaataaagtaacagatttgattttcttatgaggtaactctctcttctaggccagttctaggataaggaaaattaaagaattattgatccagaataaaaaagggggcagtgaataacaggcacagaggttttgtgaccaggaacacacaattacaaggtagatggagatgtcggtgtctttcttctatatattcaagctgaccctttttagcagaataatagtaagtaaatcctgcttaccagtttgtctgaatattcaaaacagtgcatgaagctattttgtctttggaattggtgttaaaactaaagatgctgtcatggactccgaggagtaggatggggcttaataaaacacgaaataagaggaaacaaaatgaagatttacttaagacctatgatcctccaagacactattaggcattttaaaattaattatttctttttaatcttcataacacttagtgagtggaatgctggagctggcttgcgctagctccaaagcatcaactgttaaattttcagaaattttgcaagctggttgttaaatacaaccattaataatacttaaactataaaagctaaaaattatattaagaacgaaggtaataaataccccaaaagcatcattttctaattattttactacattttactattatctatgctaagataatttacatgcattatatatgtagtaaggaaagaaatattatatttaattatgccttaatgttacattgaattcagcaatagcggggaaatttacaccacagagttagggaacactgcaaatcagagcttttttctccctttatatcttttttataagagctgattgttaaacatttaacagcacactactatgaaatacagcttattatctacagctactgatgagaaaaccaaggcccaaagaaaagttgtatttgaaaaaaatcatgccatgcagcacatctgttgtaatttattgttactttaatgcaaaatattataaagtgattcaataaaaggctaaagaatgttaaaacttctggtttagagcatacatattttaaaaactgagattaagccaaccactttctcagagtcccctaatcatccttgcacaagttagctgcttaataaaaaattttccttctgtggcttacagatgttttattgtttaatcttaatgagtataaaatatcataaccctttgacaatataagactttagttcttttattaaaacctaatacaggtaaaattaggttttaattagctttaaaagaatgcctaagttctctcatgttactagaatgtttattatgtaagtgttattttatttttaccaaacaacccattatgacatagaaatatttggattccttttaaatgttgttattgcaatgaataaataaatttatcaaaaaactatagttaaaaaaattgaaaaatattttgtaaaacataaaataactccaagtatttaaaaatgttaccgttaaacttcctggtattcatgggcaattagcaaggagcataagtctgttaattgagaaaatcaacaaatatttactgactgtctcttgtttataaggcacttattgctttctctctctttaaaatgtgtaatttataatttaaaaaatttaaaagcatactacctaactataagagcacaaagtgaccattgtgaaaaatgtagtaagctttaagaatcaaagctaaaatcatctataatcttgccacccaaagtctaccacagttaatattttgacaaggtttcttctagcttcctcgtgtgtgtgtgtgtgtgtgtgtgtgtgtgtgtgtgtgtgtgtgagagagagagagagagagagagagagagagagagagagagagagagagagatcattttattttgcttggttgaaaagtgagaaccagaatcttattccagtgcctttgatctggcaccccatgacattgggcagctcttatctttcacctttacctgatgaatctgccacagctggccaccaatctccacccctagaaatttcctccattgccctggaatcttttctttgggacaaaggacttatttgagtaaacttggtaaggaaattcttcctctcttcgaatccctctaaagcaaggcattgccatatccagaagctagttaaaaagaaacatcagttgcttcatctgtaaaatgatctctaagatctcttcctgccaacctaagcagacagtgcaaaaatggttcaaagtgcaggctctccagtccaaaaaagctgaattcccatccagttctgctgccacctatttgtatgtctctggacaaattgcttaatctatctattcctccatttccacagccataagtgaaaactataggctcacaattccttatctgaaacccctggtgttagatgtgttatggaaatccagaagctttggaatttacaaaagtaataaagtggatataaagtataatttgtaacacccacggagggcattatatcacctcttgcatattcggttaacattgccaggagggtctggaggagcaccttgcaatcaaaaacatttatattcctacagcaaaaatgtgtggtaacataaataaagcctaaatagcctcctgtcatttcaagtcagatttttccactgagttcagaagtctgttcaagctttactgcaaatgggtttggagaaactttttggtttcagaatttaaaatattttagaatgatagatcaggaattgtgtccctgtgatatgtcattggattgttgtaaatgaaaagagttcttacctatcacaggacctgatacagatctgagagctcaataaatgttactacagcaacagcaactaatgtttatattactactatttgtgttgctattacttattgttattattacttcttattcaaaagctctggacatctcccccacccttctctccagtgccacagccatttgcattaattctgttcttcctttcttacctggactcctctaatgtgcttcttaatcaatctcccagcctctagtccttctcctgcagcatccatcagaagttagcacagaattgttctaaaaacactaacatgacctcgtatctcccctactttcttactatcctccactggcttcccctcactaacctcataaagtctaaattgtttagtatgatgtacaaaaccgctccctccttgtgcattacgctgtagcaattcttaaagtcccctcaaacataccagactgatttcaatcccctgcctttgcagaagtttttctgagggcctcagatatcccatcacacacataccccataccattgttctctctgttttctctgccacatacatatcttaattctatcaccatgcttattatggtgggttggaacttgtttgcttctgagtgtccctctttgaagacaagaactatttttttcaattccaaatctccagcacctagccgtcatcagcactaaaaatgttaattgaactaaatcccatgtctaacactgtcttgcaaggttaactgggtgccagatgatcatctcctaaacatggcaaagctgaacctctttcctctctctctttttttttttccagaaaagaatacatgcagggaaagcccagagcagtttggtgtcatcccttccacagtggaagctgacaaatgacttcatggtgtgggcaatttggggtaggaagagatgggctgctgagttcttaaataacatccagaaaagctagtgaagtgagacaaatgggtgagaggctgcaggtgctgcgtgactgtaaggtcttcctgcccacaggttgctcctggctattagtactactaatatttcactctccacaacagcagtagcagcaggagaaatgtaatggtgagggctcttctcaggccctcagctggttatctgccatgacaccaacaacccagatgaggagcagctgctattcctctctctccctacagatgactgcaaaaagaaaaaaaaagagtcatttccagttttgctgttttaacttggtgggtttgtgtagtggaagtggcgagatttaaataaaatcaatttacatcttaatttttttactcctaagatactgttttttgaagatgaatatttcagtgctggaagtgtataatccttccaaaagcttcaaatgccaatatgcatctaatgatgagagaagatgcttggcatttctctgagatgtgccaatggaaagtcagccatgaggaaattaagtaaaatcaacacatgtgcacaccccagggctggcagatgtttctccatgaacagctttatagaatatagagtgttcatgcagtccctagttccaaaaattgggcatagatttttagataagtatgtgcctgaatataatatatgtaggacattgggttaagctggattttaatcttgtacctggcacttactagccatgtggccttcaggaaggtagttttctgtctctgagccacagtttgctcatatgtgttaacagaaaaagaattacagtcagctactaatattaagtccacatactataccagatactttttacttatttagtcctctcaaaacctggtaacaaaaatgacattaactccattttgcaaatgcagttcagagagatgataaaacttctccagtgtcacactctaatgaccatgggcatatgctgctcaaatcttcctgcaagagaacctattggcaaaagtgtagttggtggacatcctccagctgctataccttctgatccataccagcattcatcactgaggctacattctctcagagctgctctcagccaatgacagaatagtttgggaactagagatgggtgattccagcccaatgcagaactcctttgatgagcagtctttgttctcgagctccccatttcctgggtgaaactttctcagggctcaactgaagtctgaggtccttcctacccaaccttcttccttcctctctctttgtacaagtgtagaaactgcatcgtagtctgaaagctctttctacctactctgttctcttcccactttattttttgtagttatttcccccagattaatctcttgcttgtctatttctctcctggcatctccttcttagaggacctaacctgacacacacatagagaatatgatacactgagtcaagttctataagggtaaaatgaagataggaataggataatgagaaaatgcttttgaaagattccaggacactgcccgcgtggaggccagcagtgcacaacccttgctgcacatctgaaccatgtgtgctatgttttaagaatagacaagttgctacccatctcaaacctactagaagctctggtagctagccataattttttagaaataacttattgaggcgaaattcacattacatagaaaccattttaaagaaaacaattcagtgggattcagcacattcacaatgttatgcaactaccacctctatctagttccaaagcatttccatcacttctaagtaaaatcccttaccattaagcagtttctccccatccctcacttcccccagcccctgacaaccaccaatccacattccatctctatggatttctctattctgaatatttcatattaatggagttatacaatgtttgtccttttgtgtctggtatcttgtacatagcataatactttaaaggttcattccgattgtagcatgtatcagtactttattcctttttatgactaaatatataatattccattgtatggatataaaacatttgtttattcattcacctgttgatggacatttgggctttttccaccttttggctattgtgaatagtgcagccctgaacgtggatgtacaggtagtcaacatctttttatgtgcttgttggccctttgtctgtattctttgaagaaatgtctattgaagttctttgcacattttaaaatttgattgcttaaatttttgttgttgagttgtgagagttctttatatagtctagatatcagacctttatctaaaatatgactttcaaatattttctcccattctgtaaagtctcttttcactttcttggtaaagtttttaaattttgataaatcctaatttgtttactttgtttagttcatcatgcttttggtgtcaaatctaagcattcatagccgttataaataattacttttatggctttagctcttatatttatttaggtgtgtgatctattttgagttaatttttatatatagtgttaaggtgagggtccagctttatacttttgtatgtagatatccagttgtcccagcaccatttgttgaagagtctagtctttctcccacggaaaggtcttggaactcttgtcaagaatcaattggtcatagaaagatgggtttactactgaactctcagttctatcctactggtctatttatctacccttgcaacaatttcacactgttgtgattattgtagctctatcataaattttgaaatcaagaagttattcctccttttctcaggttgttttggctatttgggggcactgcaattccatatgaatttgaggatcagttttgttttgttttgttttcccctttttttattttttaagttctgggaaacatgtgcagaacatgcagttttgttacataggtatacatgtgccatggtggtttgctgcacctatcaacccatcatttaggttttaaaccccacatgtattacgtatttgtcctaatgctctttctcccctttcctcccaccccccaataggccccagtgtgtgatgtttccatccctgtgtccatgtgttctcatcgttcaactctcacttatgagtgagaacatgcagtgtttggttttctgtttctgtgttagtttgctgagaatgatggtttccagcttcatccatgtccctgcaaaggacatgaactcattattttttatggctgcatagtattccttggtatatatgtgccacattttatttatccagtctatcattgatgggcatttggattgattccaagtctttgctattgtaaacggtgctgcaataaacatacgtgtgcatgtatctttatagtaaaatgatttataatcctttgggtatatatccagtaatgggattgctgggtcaaatggtatttctggttctaggtccttgaggaattgccacgctctcttccacaatggttgaactaatttacacccccatcaacagtgtaaaagtgttcttatttatccatatcctcaccagcatgatcagttttcttatgtctgtgaaaaaggtcattgaaatcttttatagaattgcattgaatccatagattactttgaatagtactaaagttttcacaatattaagtctttcactctgtgaacatggggtgtctttctattttttaggtcttctttaatttctttcagcaatgttttattgttttcaatgtacaagacttttacttctttgggtagatttattcttagtttttttattcttttggatgtttatatgatttggctctgtgtccccacccagatcagaccttgaattttaatccccatagtccccacatgtcaaggtcaggaccacgtggaggtaattggatcacgggggcagtttcccccatgttgttcttgtgatagtgagttctcaggagatctgatggttttataagggtctaacatttccccttcttgcactcactctgtcctgccatcctgtgaagaaggtgtctgcttcccctttgccttcagccaagattgtaagtttcctgaggcttccccagcaatgcggaactgtgagtcaattaaaactcattcctttataaactacccagtctcaggtatttcttcatagcagtgtgaaaacggactaatacagatgttattgtaagtgaaattgttccttaatttcttttttggattgctcattgttaatgtaagaaacacaactatacactagctgtgtgtgattttagtgtgtttgtcttttcctaatcttatggggaaagccttcaatctttctccactgcgtatagttttagctatcagtttttcggaaatgttttctatcatgttgagaaggtcacttttttggaaaagcattaaaaacagttcctgtagcagctcaataagtgtttattaaattgaaaacaacaagtggttcccccaatctgctgatatgctttagtacagagagacttaatataaaattccatgcaggaaaaaaacacacaaaaataaataggccattctaaagacactgattatgactctgggaaccagtatcattatgtgaagaaaagagaacaggttttgctgtcagattaactgggttggaatgccagctctgctatggttcaggttgcatgacgttgagacattcacaaaacttctttaaatttttttcttatctgtagagataatataaaccttgcagggtattgtcatgattatatgtaaaggactgagccttgaatctagagcacaatcattgctaaataaatggtagtaccctttgctaagcccatctctatgatttgcagggcctaaaacaaaagaacataaagaagcccacttaccaaatacttagttatttgaaaattataaatcaagataaataaggtactcccttcacccactcagtttcttcattagctgaatttttaaaacattcattgagcatcaattcatatcagatatgatgttccacttagattaaaatgtcaatcatgggcatccagagaagaatggaggaaagcagacaatatctaaaacactgtttccaagattccaattaaaatactcagtgaaacacgaaaagatatgcaaagttttaggagtaccaaaatgcagaagtatttatcaatagctaagataatatttaaagatgaaacatgaaggcattcatttagtaaacatttattcaccacctactatttgctagattctgagtcaagaataaaataagaacatctgctactactatttaataaattcaataagttctaccttatgaaataagaagagaagatcaaattattatttatacctttgcaaggaagcattccctgaccatcctattaaaatttcaaagcatactaccccacaggactcacttattatctccattctctgcctaattttcctccataatgtttagtgccttttaaaatattgtatattttacatagttattttctttattatatgtccctccattaaaatgctagcactgagggtactcccttggatgaatataacacaatgtattcatccattcccttcatgaaggacattaggattgttatctatgttgtcaccattacaaataatgaatacttttatacatatcttctggagcatgtgtgagagtttcttatgatatatataataaattcttgttatttgcagtagttatgttgtataaggtcactttgaacactgaataagctaatattgaaccattattgttggggggaaataaagggttaggcccctaaaaacttctggtcacaatatttttgtcaatcaatcaataaaaaccttgttttatgtgtgcttcttttaaaagtcaactaatttcatatatattgttgatgcattaacagtgaactcacagccacttaactgtaactcatgcttgcatgaagcttagctggcacatctattttctcagtaacccacatcacagccttcttgcatttcagatcactggataacacttcagcactactcttaggggccacttttaatagtaaaaccaccaaataaaagcacagacctttgaaaattatggcactaagtcaaacacagataggaagcttgtttaaagtatgaaaaatgggagaagaaggcagagttttgccttgttcaacctcagctgggaacatgcatgtcaagttactcaaatttttcacagctctgcgtatgtctacaggtggctgcaaaagcaccatgaatattaatttgagggttacagataagttttcgaaagcaggcaaattcacaaatacagaatctgtgaataacgaggaccgactatacttacaagtagtattcctggatattaaaatatagccatcatcaattttgctagatgttagcaaattgttattcaaaacgtgtgtacctatttcacttctaccctaagtttcactagatccaagagtccccacattcattccaacttttggtattactatttttaacatccatgaatccgaggcacataaaatgtcaacttgtggttatttgtttacatttggatttattagattactaaagagactgagcatctcatagaggtttttcttcctttgttcctgttgatgctttttgttcatttcctgttgtttgttgactggtttgtcttggctatccttggtcaactacttctacatataaatttaggagtaagtttcctcagttttatgaaaaattctattagataatttattggaattataccaatattacaggataatttgtgaagaattaacatcattaaaagaattactatcttctatgtgtttaagagatgttttgtgattttctttgcaagaatattgtacatttggaagttaaatttatttctagttattataaagattgtgttattataatttatgtgcttatccatttcattttctaattgattactgttgacatagggttcactattgattttttatgtcaatgttttatcttgaaatcctctgaactcctttgttatttttaataatgtttgtgggttctgttggggttttttctcatatagatgtggcagaaactactatttacagtccagagcctaattgccacatttttcttttgcctagagatactccccctccccttagaattccttcttcagccctctccctctccttcaccctctccccacagtctccctctccctctctttccacggtctccctctccctctctttccatggtctccctctgatgccgagcagaagctggactgtactgctgccatctcggctcactgcaacctccctgcctgattctcctgcctcagcctgccgagtgcctgcgactgcaagcgcgtgccgccacgcctgactggttttcgtatttttttggtggagatggggtttcgctgtgttggccgggctggtctccagctcctaaccgcgagtgatccgccagcctcggcctcccgaggtgccgggattgcagacggagtctcgttcactcagtggtcaatggtgcccaggctggagtgcagtggtgtgatctcggctcgctacaacctccacctcccagccacctgccttggcctcccaaagtgccaagattgcagcctctgcccagccgccaccccgtctgggaagtgaggagcgtctctgcctggccgcccatcgtctgggatgtgaggagcccctctgcctggctgcccagtctggaaagtgaggagcgtctctgcccggccgccatcccatctaggaagtgaggagtgcctcttcccggccgccatcacatctaggaagtgaggagcatctctgcccggccgcccatcgtctgagatgtggggagcgcctctgccccgccgccccgtctgggatgtgaggagcgcctctgcccggccgcgaacccgtatgggaggtgaagagcgtctctgcccggctgccccatctgagaagtgaggagaccctctgcctggcaaccaccccgtctgagaagtgaggagcccctccgcccggcagccgccccgtctgagaagtgaggagcctctccgcccggcagccaccccatctgggaagtgaggagcgtctccgcccagcagccaccccgtccgggagggaggtgggggggtcagcgccccgccaggccagccgccccatccgggagggaggtgggggcgtcagcctcccgcccggccagccaccccatccgggagggaggtgggggggtcagcaccccgcccggccagccgccccgtccggagggaggtgggggggtcagcccccctcccggccagccgccccgtctgggaggtgaggggcgcctctgcccggccgcccctactgggaagtgaggagcccctctgcccggccaccaccccgtctgggaggtgtacccaacagctcattgagaacgggccaggatgaccatggcggttttgtggaatagaaaggggggaaaggtggggaaaagattgagaaatcggatggttgccctgtctgtgtagaaagaattagacatgggagacttttcattttgttctgtactaagaaaaattattctgccttgggatcctgttgatctgtgaccttacccccaaccctgtgctctctgaaacatgtgctgtgtccactcagggttaaatggattaagggcggtgcaagatgtgctttgttaaacagatgcttgaaggcagcatgctcgttaagagtcatcaccactccctgatctcaagtacccagggacacaaacactgcagagggccgcagggtcctctgcctaggaaaaccagagacctttgctcacttgttaatctgctgaccttccctccactattgtcatatgaccctgccaaatccccctctgtgagaaacacccaagaatgatcaattaaaaaaaaaaaaaaaaaaaaaaaaaaagaatggtgaaagtaggcatccttgtctttttccagttcttataggaaaggctttcagtttttccccatttaatattttagctgcggatttgtcatatatgatcttgattatgcggaagtatatttcttctatgcctaattttttcagagtttttatcataaaaggatattgaattatgtcaaatgcttttctggatatgttaaaatgattatatggtttttgtccttcattatgttgataggatatatcatatatattaacttgcatatgttaaaccatccttgcatccctggggtaaatttcacttgattatggtggcgtattatcttttgcagaaacatggatagaagtgaagttcattatgttaagtgaaataagccaagcacagaatgacaaatatcacatgttctcattcatacgtggggactgaaaagtttaccacatggagttagagagtagaatgatgcttatcaaaaggtgggaaggatgaatgggggtgaagagaggttggttaatgagtacaaacatacagttagaagtaataagttcttacgtttgatagaaaagtagaatgactataattaacaatcatttctcatatatttcaaaatatctaaaagatttgaaatatgtttcctaacacaaagaaaggaaaacatttttgaggtgattgatatcctaaacatcctgattcaatcattatacattgtacatatgtatcaaaatatcacatacaccccataaatatgtacaattattatgtataaataagaaagacagcagctaacaaaaaactagaaatgtaaaagagataataagtagcagaggatttgtagaaaaggagagacacagcacacaggaaaatatagctaaaaaattacccaatatacaggtaaaaatattttctaaaatatgttagaaaaataaagatacatagagaatggaaggaaaaatatgacattgtatactttgagttctagaaaaaaagagaaggaataatacatgaaatctttttataaattacagaacatatgaatgctcaagttgagagagatcaccggattccatttagaattaaaccacatacacacataaatacacatatgcacacaaacacccaaagtaagggtattgcaaaaactaataaatataaatttatcttaaattcagccagagaggaaaaaacagattccctataataaaacaataattttactggtagaagaactctttttttattattattatactttaagttctagggtacatgtgcacaacgtgcaggtatattacatatgtatagatgtgccatgttggtgtggtgcacccattaacttgtcatttacattgggtatatctcctaatgctatccctcccaccttcccccatcccatgacaggcccagtgtgtgatgttccccatcctgtgtccaaatgttctcattgtttaattcccacctatgggtgagaacatgcggtgtttggttttctgtccttgtgatagtttgctcagaatgacggtttccagcttcgtccatgtccctacagaggacatgaactcatcattttttatggctgcatagtgttccatggtgtatatatgccacattttcttaatccagtctatcattgatggacatttgggttggttccaagtctttgctattgtgaacagtgccgcaataaacatacgtatgcatgtgaaaaaaaaaaaaaaagaattccttcttcacagatacgcacaccaatttcagctgagcacataaccaccagctagaaatcgcatgttccatcttccctgtaaccatatggttaagttctgtgttttttttttctttttcttctgttgttttgttttacttttagtgggaagggctaggattttcagtacaaggtagattagtagcagtggagatgtgcatccttgtctcatacccaaattaacagtaccatttctaaatgcttactaatataaaatttgtcatagcttttggattccctccttcactgctatgtatttcatcatattatgtaatttccctttctttcttagttggttaagaggttttctttttatttattttttctcacaaaaaagtgttaagttgcacgcaatgctttttctgtgtggtattgtatgtaaggttttttttttttttttttttttttgtatgctttctacattccctcagctgcctccttctctcttggttggtagtctgacctgctgaatctcccctccacttctggtcttagatgaaatgccacaaaacagggcttgggaaatggcttcttgagtagctaccaagttgccaaatgtatagaagcattagatctctgtggaataaaatttgaccaatgggaagcaagagtcaggagggaaccagacagatacatttccactcctgtccctccgcagtgccgtttcctcttacaaaccttttagaaaagttcccataagcagagggaatatgcttaaatgtctttgcaactgaatgtctctgaacttgtacggaagtggtggccagcacagcaacacaatcgctgtacatcttttcttgcctcacatcacctattttcctcaatcactgcttggatttatacccctcgaagtgtcaacattataatctgtgcatcaggctctgctttccagcagatgcagcctaggatactcaggctaaaatccattatacctagtaggacaatgttaatgtttgctcctttaatctcttagatattaatatggtgacagatagatagatagatattgatacacaaatccatctttcacttcttcattcctgaaataaattcttctcgtattttttaaaacactagattttttatatgttagcattttatttaggaattattcatttatggtcttaaataagatcagtcattagaattattttactgtcagtatccggtttcagtgtcaaagtaatacttatctataaattagagttgatgccttttttttctttttgtgttctctgaaatacatataattaccagttcattgaggcttgatgaaacttgcattcaaattttattggcttgatgtatttcttatatttgagatatgtgggattcataagggcatatttgtgactaccaagtcaatttctttaaaggatgttggtttactgaggttttctataactccatcgtcaataaaatcttaagtattagaataatttacattaaaaatgtagcttgaaatttatgaaacagaagagcatactcattacttgtaatccagtaaaattctacttttgtgtagtttttaagctgaaattatcataaatgtatagaaaaatgtatatgtatgaattaaagttcaatacagcatttattataatgcaaataatttgaaaaactatataaatatccaaaaataattgagattgatatataaagtgtgtcctatccatcccattggtttcctcatagccaatgaaagttgtagccttgaatcttggagaacatataaagattatgagaaaatactttgtgttggcaagtgagacatagcagtatattctattacttaattttgttttagaatggagagagaaagagaattaaagacttgtagaatttatccccaagttttagccttgttatattcttcattaaatttgtatacattttatcataacttgctgacatttttgtcatcaggaacaaaacatgttataaaatatctttttaaattgccattgttttctacatgtgttatagccacactaattcaggatgaggtgttagatcatcttgcatgtgaggcaacctctcccaattcaatgccgtgtcctacttaggatgaattgggatgcaaaataaccccacactgggactcagtgagaaactgctgacgtctattctgttatcatagcacatcccactggagacccactcttgtcagaatacatctagggcatcctccaaactgcaaaaataacagtccttaccaaaggataataatgtctccatgcccatcagcctgatcctggaacaaaaataatagcttcttgaattgagccaaggggattttgaaaaagaaaatttccagagtgtacactagcatggtttgtgttccattcagcaccaggtacccagtaaggagatgcttgttataaagagagctaaagaggaacatgcacagagccttttgctatcagcattgttatcaaactgttggataagaaaccatttgaccaggggagtgtacagagggtaactgaaaagatatagaattaaaatttctgaattctaatgcgagcctttcactgaggaaaacaaattccacaatggcaaaacaatccacactgggtggcaaagctcttctgacctcatgccttccagttccctcacttagccattcactcaccaagtattcgttcagatcctgctaactgtgggaggcatttttgctccaaagaagggcaaagatttgttgcacacagcctctgtattcaaggagcttattctcaaagagaatttctcaagtcaaacaattctactgcattttctgtgccagaaagtgaacgagacgcagaatagctggagataattaaagttgaggcaaaaccgcaaagccagaggtttggaagttttattcttttcaagcagatgtgaaaacttctaaacactgaatttttggttggggggagaaggatgtaagctagagacagtaattgtggaagaaggagttaaagaatacctgagagtttgatagaaaacaacctgtgtgggacaggcaaataatgggacattgaaatagaatatatgtctcaaagcatgagaaagactagctaagtcctggcagtgtaatgtaataagaaacatgacaataggtaactttacagagttacttctacattccagacattccattaggcatttgaaatgctttatctcatctaatcctcactgcaactctgtgaagcaggtatagatgagcaataaatagctcagagataaagcgacttttcccagttcttgcccttagtggagccagtgtttgaatccaggcagcctgattctaacaatttcatttttgtacatcacaccaatggtctcagtgtggtccttaaaccagctgcagcagcatcacttttcccaggtgcccatcccagacctgctgatttggaaactgtgactatggagcccaggaagctgtttcagcaagctccctaggcgattctgatgcagttgatgtttgagaaacactgcactatctcagactcttttaaatcagagacctggagtcaaattcaaactctactacatctcagctatgtgacctttggcaattgatacacctttctttcttttctttttttttttttttttttttttttttttttttgagacagagtcttgcactgttgcccaggctggagcacaatggcacgatcttggctcactgcaacctccacctgtcaggcgatcttggctcacggcaacctccacctctcaggttcaagcaattcccctgcctcagcctcttgagtaactgggattatgggtgcccgccaccacgcccagctaattttttgtatttttagtagagatggggtttcaccatgttggccagtccggtctcgaactcccgacctcgtgattcgcccgacttggcctcccaaagtgctacaatcacaaacgtgagccacggctcccggcctgatacacctttcttttttttttttttttttttttttttttttttttttttttttttttttgagacggagtctcgctctgtcgcccaggctggagtgcagtggcgggatctcggctcactgcaagctccgcctcccgggttcacgccattctcctgtctcagcctcccaagtagctgggactacaggcgcccgccactacgcccggctaattttttgtatttttagtagagacggggtttcaccgttttagccaggatggtctcgatctcctgacctcgtgatccgcccgcctcggcctcccaaagtgctgggattacaggcgtgagccaccgcgcccggccgatacacctttctaagtttcaattatcctatatataatatagagttaataataaggacccctgcattccccaatcctggaaggttttatgatgaataaaatgagataaatacaagtaaagtgtgtagagtacagttcaaacactgtactttcagaaaagattatcactcacccaggccaatatgcctgagttggacagaatgctacagatagcaccaaagttgagacaccaatttccttaacattcttatccagggaccactgaggaactctgtcgaaaacaccatcacattgtggaaattggaaaatcaaaaaatccaattaaaaaatatatatttatcttccactcagtctagcttacttgtgtaattgcccgtaacactgaaacacaatcatgcctctctggaaaataaggggacgttgtaccaactctcagttgcaatttagggtgatctgttttgctccccttactcgccccactccctgagctgcccactcacacaaagccacctaaattaaaacataatataatgccctgaattacagtgatactaagctatgaatatgaatgcctgaaagaaccttgtttctttttaatgactagccctattattttaaatatcatctgaatactaaaacgctactgcaaatttaagtaatatgtcatacttctaggtgtttctaaatattcagatcattaaaatgatggaaatagccttgaaaataattgtgagccctacaatacactgtatgaggcatatggacatgagcgagacagagtgagataagcgagagagggagagaggaaagcagagaaagagtggagagggagggaggagagggagggagatattcaggctgactggcataaaagggatttataatcatattacttcagaaaccgttactgcttgaaaaatgctggtaatatcttctgacaatgtttatttttatgatatgtttgatttacttttcaatccacagttaatttcaaacagtttgaaagatgtctcattaccataacttacatcagaagaaaaaagaatataggctattacagctaaccaaaactttagagatagatggtaaaactgtccctataaactttataaagttaatcagagaagaagggagagggagaactgaaagcaagcttgcaacgcattcagcattagtcatgaggtcagcttgctctctgacctgcttccccatagttgtttgcctattgtccaataatcatatagagcctgttacaagattatagttccccttaactgttctatagataagaacttgaacattataaaatgttaagcttttccctttgagatattccctcaggtcctgcatgctgatgaaactactgacttagctggtctgaagaacctcactgatgccagctggtctgaaggactccccaaagagctggattctcagttaatgcagtttccacatcctgattatttcatcccacttaccctgaccaatgaaaaaccccaatttttcagccctttaccctccataatccccttaaaaccccagtccagaactcctcaaggagatagatttgagggtcttctcccattttctcacttggtgatctgcaatcattaaactttttctccactgtaaaccctgctgtctcagtgtaattggtctgttactatgcagcaggcatacaagcttggtcctataacaatggtacaaactcagagagatgtcacaagaaaaagaggtatagaaatgttcaaaggtttctctaagaccacagaggtaattaggggcagaaccaagactaaaatcctgatcacctggttcttcatccagggcatttttctccacgtgaacatacttttgtagagaaagttaaaaagaagaagaaacagaaaacaattttatttagagtaactccctcatagaatgagtttttttccttaagaaatcatttccttaaatgtttccttaagtgctgtattagaatttaaatcttatatcctaagggattgagtttcagtagcacctctatgaccctaggcaggtaaggaatcaccctgagcctgttttatcactggttaaagagcagtaactctggttccctcccagtgttgctgtgctaacacctggagctcatcaaaagcaatgttcaacaaataagcatcatcataaatcccagggataggaattgagccacacacagggtgactgtgctaagatacagcattttctgtgacccgaatggtcagtcaggatgtatggttgaaaagaaacagccactgaaatattcatccaatatattacccccttacaaacaagcatgttctgtttctctgaaagtactctcctatccctgctctgttgtctattcctgactcttaagatccacacctagaggactaaagatagaacatacaggattgaagggggctcatggtcccacattacaatcctcaaaaaatgaccttaaagacagactagcaggtgaaagggtagagacaacataggtgacatcaccaagagtcacacataccaaatatcaaaaaacaattttctgtttatctctctcccttctcccttttccctactcagatccagatctgctactgcatacatatcaccaagtcatacccattctacttccaaacgtttctcaacgttatctctatcccatctggccatatctagatcatctcatttaatggtcattcatgcattcacctagccaacatttttgagtgcctaaaaaagtactagattgtttgaaatgctcagaattccatgcatattcaattgcccagacctttgctgttcccctttgagtagactccccttctaacctgacaaactcctatttgctcctcgaggccctgcctttttctatgatcccatagcaagttgtccatgcttccattacagctaatatctatttcctcgatgcctaacaagtgcctactattcagcaggtgctaagtcaagggtagatgaagagatgtcttttcttttgccttggaattggttatgtttcaggaaccagtctaaccacccgatctgacagttataatcagaccattactttattttcactcagtatttgaacttctctcaaggcccagttcacatgcaatgcaccaccaccacaacaaaaatgtgctcagacactccagaacaaaacaaagaccatccttctgagtcacagccatacacaaagagcatagactggactccttacaggattagagaagactagaactatatcttgaatgttccttcctcccctttccattcattcaacaacatttattgagcacttaatatgtggcaagtactgttataagaacttaaacatttataattgaatatttatctaaaccatgaaatcctaaacaaatagatggacttccagtggagaaatgcatctgtggaaccccagaaacagttaaaaaaaaaatccagtgagtaaatacgttttcctgagagagaaaatggctttcagcagattcttaaaaagtccctgattcaaaaaaaaaatgttgttctatattgccctacaccctgcttagaataataaatatttatacctgaacaagttccaacattttgttatttgctatataaaaagaatcctctctcattaaaagtaatggcaaagcttttggactcctggcaagatggtcaaataggaacagttccggtctgcagctcccagtgagaccaatgcagaaggcaggtgatatccgcatttccaacagaggtacccggttcatctgattgggactggttagacagtgggtgcagcccatgtagggcaagcagaagcagggtagggcgttgcctcacccgggaagtgcaaggagctgggggagcccccctccctcagccaaagggaagccatgagggactgtcctatctgtcccagatactatgcttcccccatggtttttacaacccacagaccaggggattccctcacttgcctacaccaccagggccctgggtttcaagcacaaaactaggcagctgtttgggcagacactgagctagctgcagtttttttttttcataccccagtggcacctgcaaccccagcgagacagaaccgttcactcccttggaaagggagctgaagccagggagccaagtggtctcactcagtgggtcccagtcccacagatcccagaaaactgagaaccactggcttgaaattctcactgccagcaaagcagtctgaagtcgacctgggatgcttgagcttggtagggggaggggcatccaccattactgaggcttgagtaggtggttttccactcacagtgttaagcaagctgccgggaagttcggcaaaactcaccgcagggcagcgaagcggctgtggccaggctgcctctctagattcctcttcactgggcagggcatctctgaaagaaaggcagcagctccagtcacgggcttatagataaaactcccatctccctgggacagagcagctgggggaaggagcagctgttggcactacggcagacttaaatattcctgcctgctggctctgaagagagcagagaatctcacagcaaagctctgctaagggacagactgcctccttaagtgggtccctgacacccgtgcctccttactaggagatatctcctagcaggggttgacaggcacctcatacagaagagctctggctggcatctggtgggtgcccctctaggacaaagcttccagggaaggagcaggcagcaatctttgctgctctgcagcctccactggtgatacccaggcaaacagggtctggagtgggcctccagcaaacttcagcagacctgcagcagaggggcctgttagaagaaaaactaacaaacagaaagcaataatatcaacatcaacaaaaaggacacccactcaaaaaccccatccaaaggccatcagcatcaaagatcaaaggtagataaatccacaaagatgaggaaaaactggtccaaaaatgctgaaaattccaaaaaccagaatgccttatctcctccaaatgatcgcaactcctctccagcaagggcacaaaactggatggagaataagtttgacaaattgacagaagtaggcttcagaaggcaggtaataacaaactcctctgagctaaaggagcatattctaacccaatccaaggaagctaagaaccttgataaaaggttacaggaactgctaactagaataaccagtttagagaagaacataaatgacctgatggagctgaaaaacacagcatgagaactttgtgaagcatacacgagcatcaatagctgaatcaatcaagcagaagaaaggatatcagagattgaagatcaactcaatggcataaagggtaaagacaagattagggaaaaaagaatgaaaaggaacaagaaaagcctccaagaaatatgggactatgtgaaaaaaccaaacctacaattgattggtgtatctgaaagtgatgaggagaatggaaccaagtcggaaaatatacttcaggatattgtctaggagaacatccccaacctagcaagacaggccaacattcaaattcaggaaatacaaagaacctcactaagatactccttgagaagagcaaccccaaggcacataatcatcagattctccaaggttgaaatgaaggaaaaaatgttaagggcagccagagagaaaggtaaggttacctataaagggaagcccatcagactaacagtggatctctctgcagaaaccctacaagctggaagagagtgggggccaatattcaacattcttaaagaaaagaattttcaacccagaatttcatatctagccaaactaagcttcatacacaaaggagaaataaaatcctttacagacaaggaaatgctgaaggattttgtcaccaccaggcctgccttacaagagctcctgaaggaagcactaaatatggaaaagaaaaaacagtaccagccactgcaaaagcattccaaaatataaagaccaacaacactatgaagaaactgcatcaactaatgtgcaaaataaccagctagtatcatgatgacaagatcaaattcacacataacaatattaaccttaaatgtaaatgggctaaatgccccaattaaaagacacagagtggaaaattggataaagaatcaagacccactggtgtgctgtattcaggagacccatctcacatgcaaagacacacataggctcaaaataaaaggatggaggaatatttactaagcaaatggaaaacaaaaaacatcaggatttgcaatgctagtctctgataaaacagactttaaaccaacaaagatcaaaaaagacaaagaagggcattacataatggtaaagggatcaatgcaacaagaagagctaactatcctaaatatatatgcacccaatacaggggcacccagattcataaagcaagttcttagagatctataaagagacttagactcccacaaaatagtagtgggagactttaacaccccactgtcactattagacagataaatgagacagaaaattaacaaggatattcgggatttgaactcagctctggaccaagcagacctaatagacatctacagaactctccactccaaatcaacagaatatacattctcagcaccacatcacacttattctaaaattgaccacataattcgaagtaaaacactcctcagcaaatgcaaaataatggaaatcataacaaacagtctctcagaccacagtgcaaacaaattagaactcaggattaagaaactcactcaaaaccacacaactacatggaaactgaacaacctactcctgaatgactactgagtaaataacaaaattaaggcagaaataaataagttatttgaaaccagtgagaacaaagatacaatgtaccagaatctctggggcacagctaaagcagtgtttagaggaaaatttatagcactaaatgcccacatcagaaagtaggagagatctaaagtcaacaccctaacatcataattaaaagaactagagaagcaagagcaaacaaattcaaaagctagcagaagacaagaaataaccaagacagagcagaactgaaggagatagagacacaaaaatcccttcaaaaaatcaatgaatccaggagctggttttttgaaaagattaacaaaataggtagaccactagccagactaataaagaagaaaagagaaaagaatcaaatagacacaataaaaaatgataaaggggatatcaccactgatcccacagaaatacaaactatcatcagagaatactataaacaactctacacagataaactagaaaatctagaagaaacagataaattcctggacacatacaccatcccaagactaaaccaggaagaagtcgaatcccagaatagaccaataatgagttctgaaattgaggcagtaattaatagactaccaaacaaacaaacaaaaaaagcccaagaccagacagattcacagctggactctaccagaggttcaaagcagagctggtacctttccttctgaagctattccaaacaatagagaaaggacacctccctaactcattttatgaggccagcatcatcctgataccaaaatctggcagagacacaacaaagaaaatttcaggccaatatccctgatgaacaacaatgcaaaaatcctcaataaaatgctagcaagctgaatccagcagcacatcaaaaagcttatccaccacgatcaagtcagcttcatccctgggatgcaaggctggttcaacatacacaaatcaataaacataatccatcacataaatagaaccaatgacaaaaaccacatgattatctcaatagatgcagaaaaggccttcaataaaattcaacacactttcatgctaaaaacactcaataaactaggtattgatggaacatatctaaaaataataagagctatttatgacaagcccacagccaatatcatactgaatgggcaaaaactggaagcattcccttgaaaactggcacaagacaaggatgccctctctcaccactccttttcaacatagtgttggaagttctggccagggcaatcaggcaagagaaagaaataaagggtatttaaataggaagaaaggaagtcaaattgttgctgtttgcagatgacatgattgtgtatttagaaaaccccatcatctcagctccaaaactcctaaaggtgataagcaacttcagcaaagtctcaggatacaaaatcagtgagcaaaaatcacaagcattcctatacaccaataatagacaaacacagagacaaatcatgagtgaactcccattcacaattgctacaaataaaataaaatacctaggaatacaatttacaagaggctccttgaaggaaccactgctcaaggaaataagagaagacacaaacaaatagaaaaaatattccatgctcatagaccggaaaaatcaatatcgtgaaaatggccatattgcccaaagtaatttatagattcaatgctgtttccatcaagctaccttgactttcttcacataagtagaaaaaaactactttaaaatttcatgtggaaccaaaaaagagcttgtatagccaagacaatccaaagcaaaaagaacaaagctggaggcatcatgctacctcacttcaaactacactacaagcatacagtaaccaaaacagcatggtaatggtaccaaaacacatatatagaccaacggaacagaacagcggcctcagaaataacaccacacatctacaaccatctgatctttgacaaacctgacaaaaacaagcaatgggcaaatgattccctatttaataaatggtattgggaaaactggctagtgatattcagaaaactgaaactggaccccttccttacaccttatacaaaaattaactcataatggattaatgacttaaatataaaacctaaaaccataaaaaccctagaagatatcctaggcactaccattcaagacataggcatgggcaaagacttcatgactaaaacaccaaaagcaattacaacaaaggccaaaattgacaaatgggatctaactaaactaaagagcttctgcacagcaaaagaaactgtcatcacagtgaacatgcaacctacagaatgggagaaaatgtttgcaatctctccatctgacaaaggtctaatatccagaatctatgaggaacttaaacaaatttacaagaaagaaacaatcccatcgaaagtgggcaaaggatatgaacagacacttctttaaaagaagacatttatgcgaccaacaaacatttgaaaaaaagctcatcatcactggtcattagagcaatgcaaatcaaaaccacaatgacataccatctcatgccagttagaatggcaatcattaaaaagtcaggaaacaacagctgctggagaggatgtggagaaataggaacacttttttacactgttggtgggagtgtaaattagttcaaccattgtggaagacagtgtggcaattcctccaggatctagaaccagaaatagcatttcacccagcaatccaattactgggtatatacccaaaggattataaatcattccactataaagaacatgcacacatatgtttattgcagcactattcacaatagcaaatacttggagccaacccaaatgcccatcgatgatagactggataaagaaaatgtggcacatatacaccatggaatactatgatgccataaaaaagtatgagttcatatcctttgcagggacatggatgaagcttgaaaccacaattctcagcaaactaacacaggaacaggaaaccaaacactgcatgttctcactcataagtgggagttgaacaatgagaacacatggacacaggaaggggaacatcacacaccagggcctgtcagggagttgggggcaaggggagggagagcattagggcaaatacctaatgcatgcgggtcttaaaacctagctgacgggttgatgggtgcagcaaaccaccatggcacatgtatacctatgtaacaaacctgcatgttctgcacatgtatcccagaacttaaaatattaaaaaaaaaagtaatggcaaaaactacaattacttttgcaccaatctaataaaacaccttgttcaagcttaagagatgcatatgtattaatctgtaagtaggctctttaagtatatgtaagccttttgtaaaggatatttgtctcttaatttttagcatataataaactctcaaggacacttgaggctgttttctgattttttttctttcttctcactgactaagaacagtgctctcaacacagtggagactcggtaacttaccaaccatcttggtgcacttcagagcacaggtctaaggggcagcagggtgctttatagattaaagtgactccaaaatacaaataaaattattaaattctcttcactgtcctctctagttcctaaatgacatgtatatgcttggtgagcatcatgtcaaataaaacaaaacaaaacaaaagcatgcactttgaaatcagacctaaggacctcagttccaggctctcctcctcaattaccagctgtgtaaccacagacaaggtgcttgacctctgtaggcctgtcttctacctatataatggattttgtcagaattgaatgagacatgcctagcaaagtgtctgctccataacagatgcttgtgttcataattggtgctgtttacgaaggatttccagctctgtcctcttccagtcaaacttccctgccctctgaaatttgggtatagagccatatgacttgctttggccagtgaaatggaaatacgagtcatctgtttcactttgagaatcagtatatgagctgccatttcccttttctaatgctctagagatagtggaatcacatgttgagatgaagcttcacttatctgtgtctctgcataacttcagtgagtgaagacacaccaacccccacacagataccaacctaactttgacctgtagccaaagcaagacatgagcttttcttgtacaagtcactgagatttggagcttatttgttacagtgatataatccagtgtatgctgaccaatacagtgcttaataaatattagctctttttccccattaagtctcattagctgcacatttccctcttgcatttttttcttagaaattggtctaatcccaaagtttgttctgacatgaatgagtttgtttccttgatggggcatttgggcaagaagcatataatttatatagtttttttaaattaaacttttatttaaaggcaatttaaggggatggggtttataatctttccttatgctgcactttctaggtcctctagagctactgctttttatcactttttccacttccatatatcaaaatacctccagagttaaacagcttcacattagatttcatgatctagctagatcacttatcatagaaatggaaggttaaagttgtattgtgaatatatgtatgtgtaggggttagtggaggattgttgttacttcccattattaatgtagatatagaatgaacggatcatcaatctgagagggtagcagcatttcccaattatctgttgctgcctaacaaactgccccaaaacgtagtgggttaaaacaaaaaccatttaattttatctcataatttttgtaggccaggaatttgagaaggatcaattctcagatcactagatcatctgctagatgattcttctgttccatatggcatagatgaggtcactcagcggtgttcatctggcagctagaaagatctaaagagtccaagatggttacagtcacatgtctgacgccgtggggacaacatctagaaggcagagctcagctgggtctgttaactggagtgctgacacggtagtttcagggtagttagatttcttacagggtgggtcaaaggttaaagttcccagagagaatgttctaacacataatatgcaagacttcttatgacctagacttgtaagtcctagaacatcacttctactgaatttcaccagtcaaagaagaccagtaaaaggcatccagctctcacagaaggaacggtaattccatgtctcaatgagagtaccagcaaacatttggaactatcttttttataccatagaaccacaatctcttcaacgcttctctgattccctaagatatcattaggtccaaaaactccagtcactacgttaacatttaacaagcaaaaagtaattcctttacaagtttaaatgccttcctttttgccccagagggttatctgaactcatttacaaaactttactgtgctcaatatttttcttggcccttcagttgcactctctacctttgctatattccctggaagtctggtctctaagggtaccttgcccttaggtttccatctgggggcagtcaatgggggacactggcagggaagcaaagaccaacaggagagtgagcaagaccattgcccttcagcttccaagtcactgtagttgatcccattcctgtagctgagctaaggccacagccccaggcaggcatgcccctctagaatgacagctattttctctagtcccaacaatttccctctccccttgttccttcagacttacatatgatttgcctttgtttctcttgcatttagctcagtgtctggcacttggtaggtgtttaatgaatgtttacagaaagaactgttggatgagtgggtaaatgagagaatggcaaaggacatacatttaagagaagaaaatgttcatggcaactgagtgtcaggattaggattataaaacttcttatcttctatcctttagagagagagggaaaaaaaaagaaaaatcaacaaaaagaaatacctatcttctcagaagacagtaaatgctgttctttcagagacgctgaagccaatgaaaatactaagggttacacatcaacactcccttggcgcacaaaggtctcactggcagcaacaagtacatacttctgtatgactgaaagtctatagttctctgcccgatgaattcctcaagttcagctagccaacttggagcctcatcatagcacttacaagcagagtttctttgtatgaggtaaagtgcagagagctagaacaaatgccaatccccagtgatcttttgtcccctttcaaataaacagatggcattattgggaacatggaattctggtctttcctgttggaatttcaaaagaaaaacatcgggcccccaaggaagctgctgctctcatggaacaaacggtgcccctcacatccgagaagaatcattcaacagtgtcaaggggctaaaaaacccattcctacagctcacaacaggacctagttgaagacacaaagggagaaggccatatggtacagagctctaaatggctctatttttaaggtagctctgaactgggccagaagtgatctaggctctcatcctgcatttgttcttccctccctagctgacctcaggcaagctactcatgtttctaggattctacttcctcctccataaatgggaaggctggaccagatgttcccagtgaacttatctcagatctgccattctgaaatcacaagtctcaaagcgtggcaacaaagcactaatacaatcggttttactcctaatctttctctgaagtcccagctttctcatatatttttttaaaagaattggagcatacaaaggtctacaactagcttaagtctcaccttttatttcatcaatgtacatacaccccttaactcacctttttggccctaaaaatcccaactggttgtaacagcagagtgggatttagcataaactcacagtgtgtgtggtgacctggaaaaaagtcattttgtacaacggatctgtggtatcatagccatcttaaaagataatgaaacctgagtttaaaggaagaaaagaaaggctggagattttcagctgtgttcaaaaagatttttaggtgatcttgaaagaattcctgtcatttcaaagttctaccaagcctctgttctatggactgtttcttctccccagagtccatctatgtagggtgcaaaaaaaatgtcaattttttcccaagaagaatcaatgtagtaataataataatagaaatatgtgatgatgatgatatctgatatttctatagcctctgatatggatcaggcatgattctaagtgccttacatatattgattaacttattcttcagcacagcttttaatgatagatactattatcatctccattggcaaacaaggaagctgagaatcaaaaagtttaagtaattttttcaaggtctcccagcagagctggtggcagagctggtattcaaacccaggcaatttgataccagtattaatgttttcaactcagtatactgaatgacttctcccacatcaaaatgtatccattccaaagaaatctggaaagaatgttttgaacagttatagcagtggaagaatgggcatgaatttttatctctaaggtcaatttaatttgtttatctacttaactattacccaggaagaataggaataacgtcaaaagcatttatcttgtcaaaaacataattggtttgccaagcgtaacgttattttttaccctaagaatagagcagattgtcaagccacaaagtctgcattcctgggctccttaccctatttgaaaaatgttatcccaaactgcagtcccagaccagtttctttgaatcaccatggcaacgagagtcaatagagatacctccatgtaaatttacaagggaagggctgtcattaaaatcctgtttgtggtagaaaggaggtatttggacagaatctgtcctaccagagacttttcattctaaaaagggaaacactcttgcttttgtcagaactttctgttctcaggtcttaatacattagtttcttttttctctccctggaagaggttaatgaaagtccttaatttctattttccttcacaatggtaattgtaaaatgtcttgtgcacatatatgtgtacatatgtgttatgtgcatatgcctgcatctatacacacatgtgcatgtatgtatatacgcatctacagtgaatgcacatgtatatacatacaatgtgcacatacacacacctaatacatgcatgcacatatgtactgacttcccaactctccttgtcatagcacactcagcttaaatgactctaacagatgacctgcttgtctggaagtaaattcagctgagaaaagataccaagcagcatctaccttctctgcctgtaatgagaaaagggccaactcaaatgtgatctgattcattaaggttaccattcacagaaaagtctctgcttgctcctccctgcctcccatactctgtgaacagggccaagcctatctgcccattgtttctcttgccacctcagactgttcaaaagggattaaagaaaaagagatgggctgggcccagtggctcacgtatgtaatcctagcactttgggaggctaaggcaggtggattgcttgagctcaggagttcgagaccagcctgggcaacatggcaaaaccctgtctctacaaacagtacaaaaattagcccggcgtggtggtgcacacctgtagtcccagctgctcgggaggctgaggggggaggatggcttgagcctgggaggtggaggttcccatgagcggagattgcacccctgcactccaggctgggtgacagagccagaccctgtctcaaaaatcaaataaataaataagtaaagagaaataaagacagagaaccatcaaatttttttcaaaattcgtattattcatttttaacaatggctttaaaaccgtcatcaaattgagattgcagcctcaggggagttggcaaaacctatcctgcaagagagaaccgcctgtcaaattttaactaggttctggggcttttaaatgtccctttcaacactaagcctgcaagttaagagaacccagtcaaagtcatgaggagaaacaggaagcgataagaaagtcagcctccaggcaatataggacagaagcacaggttttcatggtgtgatagaaaaaccccggttggcaacttgagtgagttacctgggcatgagaatgacttctcctagctgcctagtccttctactttgggaatggggaggattggattcatttacccgaggcttctcccattgctatcagcctaggcttctatgaaaacattctaaaactatgacaagccctgagtgcagctggctctaacttcttcagcatagttcacctcatatccagggaaatctacccacactgcttctgcaggccctgaatgcctacactgcagaaataaacaccgtgacatttacacctatggagggaaatgaaaggtgaccctgaaaagaatcaggtaattttgtaccagttgctatcctaagggactttgtaaggtagggaaatcagagtataggctgaagttcttagcacttctgtttgtgtattcgaatcataaacatatatatgcatgcatagatatgtatgcctagtgtacgcagaacttatccaacaaatatatcaggttatgaggaaatgacatgcaaataaggatgaccatcacatcatggcttgtaacagtgaaataaacaaacataataaacaataaattaaataatttaaatgtcctctgatacggtgcggtaaaatagataacatatccatactatgcagttgtgacaaagattaaagtagacttatggatgctgatatttaaaaaaaaactataggactttttttaaaacttaataatctgtcaatattgttggttttttttttttttttaaagaatgcactctcattcttttctccctccctcaacctcctgtaaaacattctaccttaaagtgtttctagaagggtcacagtggtattaatgattgtatatgggaaagaaggctagggtcagaagcctgggctaggagtgagacttacttttgtagggtttaattttttttttaatacttagaccatggcttatttttccaattaaaaaataagtttgcttcatataaaaacaaacaaacaaatgaaaacacaacagcaacaaaaactttgataaagttcaccaaagctcttttccctttataagaccactatgtggcaatttgggtctgagatgctctaaaagaaaaagactttggtttttattattttaaagagagtgaagattttaaaaagtagaagaggaggagaatagaaggaaagagaaaacaagccttctcctggggtgtatgtcagaatattacatctagcatcaacacacaagaggaaaagcaattaagggaagctcagggggagaaatcataaaaaaagatcaaggaaattacttctgagttaaagccaaaggaaatgacctgattgtataacgactggaaagtatttggcagttggcttttacatatctgaaagggataaacagttaacactaaaaacaccaaacactaaaaaaaattaataagtgataaaggaacaacattatcattcttttttttttttctttttttgagacagagtctcaccgtgtcacccaggctggagtggagtggcacaatcttggctcattgcaatctctgcctccagggttcaagcgattctcctgcctcagcctcctgagtagctgggattacaggcacacaccaccatgtccggctaatttttgtatttttagtagagatgggatttcatcatgttggtcaggctggtctcgaactcctgacctcgtgatctgcccgcctcagcctcccaaagtgctgggattacaggcatgagccactgagcccagccacattatcattcttaataaacccactttaagtaaaacttcctcattctttttcctaagagtctttgtaaagatgaaaatcaaatattaactaattcttctgagcaacaatattcaagcatcttggagctaaagggtaaaggagacacagtgagagggctccaaagttgcacttaaattgtttcaaagtggaccaagttaccacatagttgatgattagtccaagcaagacaccattttgttgtcacagtaataaacaagatacagtaataattagctatgacagcaccttctcctttcagggttgtgaaaagtagcacaggataagagacactcatacctcaattagagcctacaactgaagttgcatcctatgcttaaaattcagtgaatttacatttgacaatcacccaaaaaagaaactatctagccacctcccataccatgcaaacacacacacacgcacatacatatacacccaaacacaaacacatacaatagaaaccactgctatggtattcagtttcaagcatctcctctatgcggttctttttttaaaaattttcctacatcattaaagatttttattaaaaatattttttcataagttacaggggtacaggtgatatttggctacatgagtaagttctttagtgatttgtgagattttggtgcacccatcacccaagcagtatacactgcaccatatttgtagtcttttatccctcatccccctcccactcttcctcctaggtccccaaagtccactgtgtcattcttatgcctttgcatcctcatagctttgctcccacatatcagtgagaacatacgatgtttggttttccattcctgagttatttcacttagaataatagcctttaatctcatccaggtcactgcaaatgctattaattcattccttttttatggctgcatagtattccatcatagatatatataaatatatataaatatatataaatatatataaatatatatataaatatatataaaatatatataaatatatatatttatataaatatatataaaatatataaatatatataaatatgtaaatatatataatatatttataattattatatataatatatataataaatttacatatttatatatatttatataaatatatatatttatatatattttatatatatttatatatatttatatatttatatatatttatatatatttatatatttatatatatttatatatttatatagatttatatatatttatatatatatttatatatttatatatttatatatatatttatatatatgtatatatatatttatatatttatatatatttatatatatatttatatatatttatatatttatatatatttatatatatttatatatttatatatatttatttatataaatataaatatatataaatatatatatatatatatgccacagtttctttatccactctcctcttttcttggttaatcttgccaatggtctatcaattttatatctcttgttaaagaaccagctttttgtttcatttaccttttgtatttttttgtttcaatttcatttagttctgctctgatcttggttattttctttcttctgctgggtttgggtttggtttgttcctgtttttctagccccttgaggtatgaccttacagtgtcggtctgtgctctttaattctttttgatgtaggcctttagggctatgaactttcctcttagcactgcctttgctgtatcccagaggttttgacagattgtcattattgttgttcagtttgaagaattttttagttttcatcttaattttgtttttgatccaatgctcattcaggagcaggttatttaatttccaagtatttgcatggttttgaaagttccttttggagttgatttccagttttattccactgtggtctgagagagtgcttgatataatttcaatttttttaatttattgaggtttattttatggcctttcatatggtctgtcttagagaaagttctactcactgttgaatggaatgtgtattctgcagtcgttggatgaaatgttctgtatatgtctatctataagtccatttgttccatatagtttaaatcgtttctttgttgactttgtcttgatgacatgtctaatgctgtcagtggagtcttaaagtttcccactactattgtgttgctgtctatctcatttcctaggtctattagtaattgttttctaaatgtgggtgctccagtgttaggtgcatatctgtttaggattgtgatattttcctgttggacaaggcttttaccattatgtaatgtccctcttcatctcttttaagtgctgttgctttcaagtttgttttgtctgataaaatagctactcctgctcgcttttggtgtccatttgcatgaaatgcctttttccacccctttactttaaacttatgtgaggccttatatgttaggtgagtctcctgaaggcagcagatggttggttcgtgactttttatccattctgcagctctgcatcttttaagtggagcatttaggccatttacatctaatgttagtattgaaatgtgaggtaccattgcattcatcatgctgtttgttgcccatgtatcttgagttttttttttcctttttaacttgtatttttgttttataggtcctgtgtgatttatgctttaaagagactctgttgtgatgtgtttccaggatttgttttaagatttagagctcttttagcagttcttgtaggggtggcttggtaatggtgaattctctcagcatttgtctgtctgaaaaagactatatttttccttcatatatgatgcttagttttgctggatacaaaattcttggctgataattgttttgtttgaggaggcagaagatagggcctcaatcccttctggcttgtatggtttctgctgagaaatttgctgttaatctgaaaggttttcctttacatgttacctggtccttctctctcacagctcttaaaattctttccttcatcttaactttggataacctgatgaaaatgtgcctaggtgaatatctttttggatgaatttcccaggtgttctttttgcttcttttatttggatgtctagatctctagcaaggccagggaagctttcttctattagtcccccaaatatgttttccaagcttttagatttctcttcttcctcaggaacaccaattattcttaggtttgattgtttaacataatcccagacttcctggaggttttgttcatattttcttattcttttttctttgtctttgttggattgggttaatttgaagaccttgtctttgagctctaaatttttttcttctacttgttcaattctattgctgagactttccagagcatttcacatttctaaaagtgtgctcaaagttcctgaattttgtattgttttttctttaacctatctatttcattgaatatttctcccttcacttcttgtatcattttttggatctccttgcactgggcttcacctgtctctggtccctccctgattagcttaataactaacctcctgaattctttttcaggttaatcagggatttcttcttggtttggttccattgctggtgaactagtgtgatttttgggggtgttcatgagtcttgttttgtcatattaccacggttttctggttccttctcatttgggtaggctctgtcagagggaaggtctagggatgaaggctgttcttcagattcttttgtcccacatgatgttcccttgttgtagtactctcccccttttcctatggatgcggcttcctgtgagccaaactgcagtgattgttgtctctcttctgggtctagccacccagcaagtctacccagttttgagctggtactgggggttgtctgcacagagttttgtgatgtgaaccgtctatgggtctctcagtggtggataccagagcctgttccagtggaggtggtgggggatgcaatggactctgtgagggttcttagctttggtggttcaatgctttatttttgtgctggttggcctcctgtcaggaggtggcgctttccagagagcatcagctgtggtagaatggggaggaaccggtggtgggtggggccctagaactcccaagattatatgccctttgtcttctgctaccagggtgggtagggaaggaccatcaggtgggggtggggctaggcatgtttgagctcagactctccttgggcaggtcttcctgcagctgctgtggggaatgggggtgagattcccaagtcactggagttgtgtatgtaggcggattatggccgcctcttctgagtcacgcaggttgtcagggaagtgggggaaagctggcagtcacaggcttcacccagctcccacacaaactgaagagccagtctcactccaaagggcttggttcttcccctgcctgtggagcctgcacaccagatttgtgccctcccccgagttctggccagaaggcttctcatccagttcaaattgttacaaagttgagctatagatatgcttctccccgtgtagttttacccagtgctcatctcgcgttggatcactgtggtgccaggcaggagtggcctgctaggagacccagcaagctcccagggcctttctgctgcttcctctacccctgtatttcactcagctctccaaattgactcagctccaagtaaagtcggaaacttctcccacaaacagaccttcagcttctccagtaggagtgtgtgtttgggagaggagggtctccctttcccacttggatcactcacagttttggggatgtctcccaggtcctgcaggagcagacccctttcttcagagggtctgtgggtcctctggggatcgctggtttgttcttgcagtcaatttggagctaaaactcacaatatgagcccccgcacactgctctgtccagagctgcaatctagtcctgcctcccttctgccattatgatcgaacctcttctttttatgtttctttaaaggtccactgtatgatcactgaaagctctggaaccttgctaaatctacattgcttgacttcatttatcaagataaattgtcttactactaaaactttatgcattcagatctcttaacagatgagccattttaaactggttaaaaaatttatgtatataattcagtaaaaacagttgcaaagatataaatacatttgtcatgaaataagttaatgaagatatcagaattcttaagagcccaattaaactgcagttattcattgcacaccttttgtgcactggatgcaaatgtactcaggtcctttattgcaaaaatgaagtgctagactgagaaactgaagccatataaaagcagtaattggtttctcaaatgcagttattatgtgctgagttattataaacaatttctcatcccctttaccaggattagtgtttacggttaatggaaggtcataacttttactttattatttgtgtgctttattgccagagtcattggtggtatattattgtgatttacttgcatgaatttttttgtttacacataagaaagtacatattgatttttttagaaagatcaagatttattttattatgtgtgtgaaatatatttcactttaattggaaactttaaattggcttataataaattacatatatatgaaatactttaaattggcttataataaggaaactttaaattggcttacaataaattacatatatatgaaatactatctaaaaatattctgcctacattatcatcatggatgctctaaagtttatgcttctattaaagtgatagataacattgacatgagcaaacaaaatctttaaagaaaaaaagatgagacaattatcttttagtacatttaattacttcatcatttttattttccaaattatgttaccaaaatttttgtctaaaaattgaaactagaaaatactataagaacactaatactgaatgatatttttataagttttaggctttctgattaataaccattaccttgtaaatatctaagttctcaggtacttaagtttagggtcttagtagttaacttagattaattccatatttgtcaaagtttattgaaaattgatgcaattatttttctctaacagtaggattcacccttaaaatgtatatagttttacactacaattttaaatacagaatctggtaagactaatttacacttatatcacactgagactgtgtaattgctagaatgccacatgcatctttaaaatacatacatattataaattccttgctacgacgtggagctgcacaaaaagacttactggatatcctaattaatacaaaaagatctctttaaagtgcataactttaaaggcactgatttcatgaaattccaaagtcttccagttaagcatttacctagttataattagttccaaaattcaaaaccaatactttgtataagggtataatttataaagtggtaggcacactgtgggcaaagacatatttcactcctaaaattttggcatgatcatcccttggatttgagaacaagcaaagataaaattatataaatattttctatagatgattttccttaatgtctgtggagccaaagaaatactccaagatgtcagagactgatatcaagagttttccaggaggaaactgaaacaggcagttgcagccactatatccatcgaagacaacagctgcacagaatccttggaatcaattgatttacatctatgtgtctaatgtgccccaagagagtcactgtgtcttcaaatcacaaattacttcagtgctgtggatatgggagaagcacaaggtaatcatcaagccttacagtgaattcagtactcctgccaaaagcaaccagaagcattttgcccttctgactggtagaaaacttgactgctcctatgtagagctcagcatctgagacaactcctcttcaaagcattgttccatgtgctctcactataacacattagctaggcaggtaatgttttcctttcagttgagacttgtagatttttactcctttaagaggccacacaaatggtaagtgactgagtaaagactccacaaagatctcctaactcttcatcctgtggtctttacactgaactgcactgcctctagataaacttatcttttatcatattagaatttaatggttacaacagtaccgtttcccattattaaaagtaaaactgcataagggtttcttgtgattttaattcaccaaaaagagcagtgcttgtgcatacagaaagaaatacaccatgagatatttgtaaatattagagctgggacaaaccttaggagatgaactaatgctgctttaactcttctcccccacctctatcaaagtagttgatgtgtaaacaagcttctggcatgaaaaccctcccatatatagctactgctatcaagtgtttattgagctactatagatatcagtgcctgcctatgtccctttttccctgaacgatttttgcatatgctggcccatcttccaactgtatcacctacatcactttccttaagggcttgttctggtcactggatccttctctgctcatatacatggaaggttgtagtgccagagaattaagaattgatgactgataggagttggtagattaatacctcagtttcttctgtcttctagggagatacctctgaggtctatcttccacattggttctcagagttccccagtaagattaagctccaattactcacaatgcaaatgtgtgtggtaatccactccttgttggctttcttctctttcttgtctgacttctccatctactaccagtatttcctggggtgacctctgtcttatattgggctgctatgacaaattaccatagactgcatgacttataaacaacagaaatttacttctcaaagttctggatactgagagtctgcgatcaggatgccagcattgtgagggctcccttccaagttgcagagtgtcaacttctcattgtgtcctcacatgacagaaagagttagagagccctctaagttgtcttttgtaagggcactaatcccattcatgaagactctaccctcatcacctaaattacctcccaaagttcctaccttctaataccatcacattggggattaagatttcaacatatcagttttttgaaagggacacatcagtctataacaacctctcaaactacttgcacccaaatccttgtcttggagtctgctcctggggacccaaccaaagatattaagtgttttactatgcatcatgttagaagcttagtgcatttctgttttatgttaattaatcctcaggataatcctgcaagctatttttaatacccattttaaagatgagaaacatggaacttacagacattataatttgcctatgattgcccaaataggagtagaagagccaagattcaaaaacaggtttatctgactccagatcttattttaaacactgagaatcataagttctttttcagtgctgccccacaggtttatatacaaaataaaaaatatattggatcacttcgtaatcagtggaattcaatgaccaattgaaaccaattaagtcatatgcccatcaactccaagggaatactatattcaatgaaaaaccttaagtgagatgctgtaataaaagctatcactgatttctgctacctagtccatgtactgagcacaacactgatgatgggataattgtctggtcttgtttaggccatcatcctgttatgtttgcccatggacttagcataatgggatgatggcctaaacaagatcagacaatagtgactattggaaataattctaagggttttcaaccaagatggatggaagaaatacgataattatatccatctttttatatttcccaaaggagtagatgcattgaaaacattatttaaacatattagtaactgctaaatggtaaatttgaggttaggaaaagtcatcgcttgagaagactactgaaagatcattttacaactgctttaaccagattaagcccttctccttagcagtatttacctatagggggtgtgtaatggcaaaccagctctctaggaggaagtcagggaggaaacagaacctgattggtagtgtttgccaatttctgttgtgtaaatattcccaccatggccaagttcaagctaccaacatgatgtcattgaataatttgaatgacattgtatatagttggaagcacacaatctgccctcacaagccagtatgggtcagctctagcacaccactgttcccacaggatgatgagagcaacaacctaatggcttaagtgcatctcctttaggttctagggaagataagagatgagaaaagcagcaaacaaacaaaaaagcaggcaaatctgctctaggcaagatctgctttattctgagaggtaacgactgttctctcctagcatggatcagagacaggaggaattgtgcaacatagaacttaaggaggctgggcccggtggctcacgcctgtaatcccagcactttgggaggccaggcaggcggatcacgaggttagaagttcgagaccatcctagctaacatggtgaaacccagtctctactaaaaatataaaaaattagaagccgggaggcggaggttgcagtgagccaagattgcgccactgcactccagcctgggcgacagagcgagactcggtctcaaaaaaaaaaaacaaaaaaaaacaaaaacaaacaaacaaaaaaaaaaaaacaaagaacttaaggatagacagaacagtgtttttaaatttcagctgcatattacaatcccctaagaattttcaaaaagtcctgatgtccagtcctcactcaaggccaattaaatcagaatctctggaagtggtacttaggcatcagttgatatcaatgtgcagccagcagtgagaatgaatgctccataaaaacacttctcaaatttgaatgtgcacatattcaaatgtgtgatttgtgggtgatttgtgaaaattcagactctgaaaatattaagtaaaaaatagtggtattttgtaagttcaagaacatgaaaagctaataagctaattaacgatagtagaagtaaaaccagtggttgcctctgggagagtattgactgaaaagaagaaggaaaacctctttggtgctggaaatgttctacatttgatgtgggaaaaggtaacaaaattgacacaataagtagtacactttaggttagtacactttacaaattaagttgtacagattttttttttttttttgagacagagtttggctcttgtcacacaggctgcagggcaatggcatgatctcagctcactgtaacctccgtctcccaggttcaagcgattctcctgcctcagcctcctgagtagctgggattacaggcatgcaccaccacacccagctaattttttgtatttttagtagagacagggcttcaccatgttggccaggctggtctcgaactcctgacctcacgtgatccaccccccttggcctcccaaagtgctgggattagaataaataccaggcaccatgcccagccaagttgtacacttttagattagtatactttacacaacaaaatagtgaaactgggggaaaaatgcagaacccatgtaggttctgatggtctagatttctaacacgttcccaagcaattctgatgctcgatagcatctgatcttactttgagtctcaaggctctagactagtgtcagggtgacttacaagtcgatttgctataaatgtttacccagtgcttataatgtgccaagcacagggctgttgaatattaggtccatgaataagcatttggcttcctttaggaagccacagtctactgagggcaaatagttagtgtgatacatttattcattaattacaaataccatagtgagtctctgccatgtgctatgagtaggtgacacagacatgaacaagtcagggaaaatgcttgttccccttcccccaggatttatggatattagaccataaaacacacatatatttactcatcccaaatgagatacatgctataagaacagggtgaagttgagttgttgaaagaaggtcaatatggttggaaagtgagaagtgacagttagcagtaaacaatgaggtcactgatccatataggggccggagaaagcagggcttgatgagccaggttaaggattctggtctttgtcttaagagcaatgggaagcctttgaaagggcttaagcaggagagtggcataatcagatttgcatttttaaaaagatcactctaactgcattgtggtgagccagttggagagcggccagaaagagggtcagtctagtagaccaaaagagagatgatattagcttggatgagggcaatagctatggagacagaaatgggcctagtttacggatattcatgtaggaatatagacaaatcttgatagttgattgactacaaaggagtcaaagatgactttgagtgttctcacttgcacacctgtaaaaatcagggtgtcatgcacaaaaatggggaggaacactgtccttattgtttccgtattctccaggcttaccagaataatctcaattttatgtaaatttattttttagttaacatagttttccaaatataagatttataaataaatccacaaattaaaaaatgtttgacaatgatacctctttttccatggtcagcatagctgaggaagagctagattcacataaacctggatcactgtaatgccaggcccacttatgtttcactgtggacataaagaccccaaagctcaaaagttaaatacaaattattcttttctatgcatttcccctctttcttccctttaggactcataaactaatagttgactatgttatatagagatacatgcttaggaaactgcttataattgtgtgcactgctgttttgccattgctgattttacttctcagagtgatgcattttaaaggtgtgttcaaagcccacctgtctgaatgactctcaggtgccacacaaagggtggcagatgatgaacatgacctctaggagataagaagcagacctggatgcattattgcattattatccttctaaaagaaataaaaccttttggtggctattgagatcagattcaacgtgaaaatataggagtttagagtttactggagtccctgtaggtcaactaagtgcccctaaaggctttcaggtagcatagattgtttcaagcataaaataccgctttggaatatcaaacattaagctctcatcaaacactgtaggtgagtaaacagaggctttaactacaaatacatgtattaaaaatttcttcttgagcagtaacaatggccaaagaattgcgcaagtttgggaacctgtaaaccaagagtcctaccctcatggtgctgtattctaccaggaaaacagatatgagaagaaccaaagaaaattcaagatagaatgaaattaatgctgaaaagagagagaagcaacttttgtgaaagccaaaagaatgacatattttctctcactgggagacaagaaagcgcttattaaaacaatgtaatttgaggtggtgataggtgaggaataaatccaaattttacgggtggagaaagcatgtccagtccaagataacaccatgtcaaaaatatcaaaaagcaaaattgctttcagattttgggaaacacgtagtagtacagtgagaataacgttctggtgagaccagggtgagcaagcttataaccaagcatgaagggcccagaattctggactaaagaggcttaaatgtaacgcatgggctctgggaagccattgaaggaaaggcaggaagctccatttggaaggggaatgttgctggactatgggcataatgaaaataatggattattgtgaatttgtagccaaagcccacattctcttcaggtgaattgcaatgcccattgtttcactggtaactttgtaaaacagaagagacatttaaaataatgtatcttcatttatcattttgtgtgtcatacaagtctctgtaaacttatatgaccacatctccaagatagaaagatttatctatatttaattctctaaaagaaaagatacaatcagtaagtttagttttacgaaagaataattttcactatctaaattatgattgtgcaggctataggttattttactaaaaaattattggttcaaggactgagttgagttttgagttctagccaattttttagtgcctaagtctaaacaactattgttatgtagaggtggaataaatgttttatgtgtgtgttatgtgtagaataaatgttgtttttggttctttttcttttttttaaacaccccctgcccccagtaaacacaataacaattatattgtatgaagcatttcaagtacatattcaataaaatacgtaagacaaatgttatatgacttgacaacataatacgtatagaataaaatatgaaaagacttggattattttcattttcttgatcttttacaataaaataaatacctgatttggaactgtatacttcaaaaatttattggaataatcgttggtgtccctttctttttctgtcctagtgtaacttatttgtccaggatatccattgttgaaggaaaaagggaggattcatatggcttggctgtgtccccacccaaatctcatcttgaattataattcccataatccccatgtgtcatgggagggacctggtgggaggtaactgaatcacgggggaagttactcccatgctttcttgtgacagtgaattctcacaagatctgatggttttataaggggctttcccccctttgttcagcacttctcctttctgctgccacgtgaagaaaaatatgtttgcttccccttccaccgtgattgtaagtttcctgaggcctccttccccatgccgaactgtgagtcaattaaacctctttcctttataaattacccagtctctcgtatgtctttactagcagtttgagaatggactaatacagtaaattggtgctgaaggagtagggcatggctataacgatggaagcaactttggaactgggtaacaggcagaggttggaagagtttggagggctcagaagaggacataaaaatgtgggaaagtttggaacttcctagagaattggagaactcagaagacaggaagatgtgggaaagtttgaaacttcctggagacttgttgaatggtttcaaccaaaatgctgataatgatatggacaatgaaatccaggctaaggtggtctaaaatggagatgaggaactgttgggaactggagcataggtgactctttctatgctttagcaaagagactggcagcatttgccttgccctagagatctgtggaactttgaacttgagagaaatgattaggatatctagtggaagaaatttctaagtggcagagcattcaagagaaagcagaacattaaagtttggaagatttgcaacctgacaatgcgatagaaaagaaaaatccattttctggggagaaattcaagcccactggagaaatttgagtaagtaatcaccaagaaaatggggaaaatgtctccagggcatgtcagagaccttcatggcaacccctcccatcacaggcccagaggtctaggagggaaaaattgtttcctaggctgggcctcctgctctgtgcagccttaggatatggtaccctgccatgtccaagctgcttcagctccagctgtggctaaaaggggccaaggtacaggtcaggctgtggcttcagagggtgaaagtgccaagacttcacagcttccatgtggtgtttgtcctacagatgcacagaagacaagaattggaaacctctgcctagatttcaaaggaggtatggaaatgcctggatatctaggcagaagtttcctgcaggggtggagccctcatggagaacctctgctacaacagtaaggaagggaaatgtggggttggaatccctacactgagtcctcagtggggctctgcctagtggagctgtgagaagagggccaccatcatcaggactccagaattgtagatcaactgacagcttttaccatgcagctggaaaagcctcagacacacaagctgtgaaagcagctggaagggagctgtaccctgcaaagccacagggacagagcttcccaaggctgtgggagcccacctcttccattagtatgacctgggtgtgagacatggggtcaaaggggatcatttcggaattttaaggttaatgactgccctattggattttggacttgaatggggccggtagcccctttgttttggccaatttctcccatttggaatggttccaatgtttgtatccccattgtatctaggaagtaactaacttgcttttagttttacaggctcataggtggaagggacttcccttatctcagatgagactttggacttgaacttttgggttaatgctggaatgagctaagacatgggggactgttggaaaggcatgattgtgttttgaaatgtgaggacataagatttgggaggggccagaggcagaatgatatggtttggctgtgtccccacccaaatctcatcttaaattgtagttcccataatccccatgtgttgtcagagggacctggtgggaggtaatttaatcatggaggcagttactcccatgccattctagtgatagtgagtgagttctcacgagatctaagggctttataagaggcttttccttccttgctcaacacttctgctacctgctgctatgtgaaggacacatttgcttccccttctgccatgattgtaagtttcctgaggcctccttagccacgctgaactgtgagtcaattaaacctctttcctttataaattacccagtcttgggtatgtctttattagcagcatgagaatggactaatacaaagataatggaggttgaagagataatggaggataaggcacatgatttgcttttcagcaaacttgcttttcagcagacctagagaatgaagaattgcattaccttgcaataaggagttaggtccataaaaaatcgttctgttctctatcacttcactcatgaaagtatcacaagtggcactaacgttcaaaaggaagaatattttgatgaattcctttgctatgtgaagttaagtagattgataaatgctgtccaggttcaggacctttaaagaggatacaggaaacttgaaatcttaatttcttgactagcattcttttgaaaaagcaaaagatgatcatggagaaatattattacttaaaactattcaactctgggtcactcaagcagaaaacaccctgatttcgtgtgcaggagtggcaaaaaaaaaaaaaaaaagcatagctttagaaactaaagttcttacattcactttcatgactttgtctgtgaaaacatgggttctgcataagaccaacatcctaaagtgcagcagaagcagaatcaaagcccttggtagaagatgagctctagaaagttttctaacccacaggaaaaattctcttttgcaccattgtaactattaataaaaaatactcaaagatgtgttaataggtaatgctctcaatttaagatactaactttacatttctctaattattgcttggaataatatcccaagctttaaaaataccagtaagacagtcccattcaatatcggagtagagatctttactagtgcaaaaatacaagaaaaagacatacaaattaggaagaaacaagaaacaatgctgtctctgtcctcaaataaaatgattatttacatagaaaatcctagaagtctacaaaaaggccattagaactaagtgagcttagcaaagttgcattgtagaaagacaatacacaaaaatcaatgacatttctatatattagctatggaatggaaaatttgcattttgcaaaagtactatttataatggcaccagaaatgtaaaatctaaatctaggtaaaatctagatcagcatgaaagatgaaagtctgcatctagcaagatatgtacaagattcatatgctgtaaaaactactaatgagaaaaattaaagacctgaacaaatgaagatgtataactcaacttcatggattggaagatttaatattgtgtagaatcaatgcagttccaaccaaaagtatcagtaaggtgagttttttagttatattttgtaaaatataaacttacgtaagagaaataaaagataaccccaaacttcaagtataatgaaattacactttgaaatgtcagcttcttgcttctcaaagtaaggttcatggaccagcaggagcagctgcaccatctggcagctgctcaagacctgctgaaggagaatctgcattttaacaaattctccaggcaattcaatttatatgcatattaaagtctgagaagtgcaatgttagtgtgatttttcacttccagcccttcaaagttcaggtaacataaattaattaaattcttttgaaggtttgtgtatttctttgggagaaccctatgtactgggccctgaagccatctctaaggtctgaatacattaaagcaagtaattacttaaaatagcacctactcctcccaaaggacgtaaacttttagagtagcatatacactggggagatggataaaacagatttttaaaaaccttttctataatgagactgtcacttgtacagaaaagcatttaatcaatgttaaaagagaagtaaccaaaagcatatgcttccaaatacttttttccttttagagacagggtcttgaatccttgctatgccaaacaattttttaataaaaatgtattgctctctttcctgttcaacttttaaggtgcctctcttccttgactcctacctctaggaggtaacataaagggtcttgttgtttgtttgtttgtttctgtagagaggggatcttgctatattgcccaggctggtcccaaactcctgggctcaagcgatcctccaacccctgcctcccaaaatgctggcatgagccaccatgcccagctgtagagttttaattttatctgttctcaaatcagaattcacacacacaaacacacacactctcacacactcacacacctgttcatttaaggaagttccaacacatagctatttcatgggttgagccaggacttagatatttctataatattatcattatctctttaagtttgtgtatgtttattctttctaactccagtatccaggccttttctcatgtgtctctaaaagataaccccccttcaaggttctgtggaggccttttgcttcccagtatccaagtttataatgcttcttcacttttcttcaggaactccattcacaaaacattgcatccgaccatgagagcagatcctgacacctgtacttactcggccactacctgagcaagatgcctcagtgtgagaaaagacaccatgaaatgagaccactctgaaagcaaaccagccagtacttggaaagcctgaaagccagtaaaatgaagaaagccagagggaaccatttagcctggcgactgcctagcagttgacatcatgggaatcttcccaacctccttcatggactacctattcctgagaaatcatctacatagtacatgatgactactttctgagcacttactactcaagtctcacaagtctattatctcgatgtggtccctaagagaatctctattccctggtttgtcaaccagatgatttctaacaaatgaattgccactgcagcatatttagcaaggaagagctccgaacttgcagtatttcattatatcaaagaaatgaccaacaccccttggtcagtaaactctatcactatcacatgcatcacagttaggactccatggctcatgctactgaatttagaagtgtcattcctgtgcaatatctgacattcactagcacaatccatttaaaaaaatatatgctgttgatcaagccaaacctcagctttcttccctcttgaagtaattggctgtgactcatccatttgcacaggacacgataaaatgctgtctgtgttttgaagaaattaagtgcctgatttaatccacgtgtcttcctttggagatttaattattcatttctccatgagagcaaaaggttggatgccttgggtaatttatagctgggggattgtggaagaacatggagagtaggaggagaaagaagagaaccaggggagaaactctattaaaaataaagtgaactcaggcaggaaggcagaaaagctggagatgaaaaagtcaacaagtaggagggaaaagagtcattgcccacagtgaaggcagagaaagatgagaactagaaggagacactcaataatgtcagagtaaaatggagaaaataataaaaaaaagagagaaaggggagagagagtccacgataggaacagaagaaaatcctcacaccaccaagcctagcggagcagcagtgacggtacttaatgcagtccagcactcatctggtccctccacttagatatcatctagttgcaaagtccagatgtgattggatcagattctcctgacaggttatgagctacagcataggtctatagtgtctgtggaatcctcaggctcatgggatttcattgtcatagttctgtacggcgtgttctgatttctgagttaggagaggataatgagggaatggccatattgctttgaaaaagagcctttctttccagaaatggagcagtccagagtttcaggagacctagaaagtttgcaccagcatttttgaaacagtccaaaatgtacagaacatctgctttaagaattatgaggacctacatatcaatgagaatgactggacaacactgagaactcttacatggaaataataatataacaacaggcctggagtggaggggccatataaatgctagcacttgcattattactggaaacacctccccctaactcaggtatagtaaaagttcctctctccaccatagttttgatataacctatagtcatataaaggcccatagattacagcatctctgcaactttctaaattacttcccaggatattaaaagtctatttgtaaccaataatggaaagggcagaccactccagaattcaattttcagtcattccaacagctgctgttatcctaaacacagaaacaaattttgcaggccagcttcagcccaaatagttccatctcctccccactgtagagactggtcttcacacagctgaagacggttaatgctacaagcagcaacaaaaaggggactcctgagaaatggtctacttaaggattcagtatctaatattcagttagttttccttagtcctggctctgctatctggaagctatgtgatgttgatcaagcccataaatttctctgttcctcgtttttctttatgtgaataaaatgaaagggctggcctagaagagagaaaaagagatatattttacagataagagtaggttcacgaatccattggtagtattaatgtaactaatgtacagcctcatatcttttgttgtagtcaagaaccagagcttcttttattaggtgcaatatggagaacatttttataggtatgggaaagacattttaggtggaatgctcagcatggtcacaggtatgaacatttaaaaacttagattgatggcaacaaagcggccagatttggcaggtacttgaatgccaggctgcagtgttaacatgatcttgcaagcagcagagaaaggtagaaagtttttgagtcggagagtggcataatgaaaatgctgtttcatgagggctgaactctcttataattgcctgcttccatgataatgacattgatccattgaagagggcagagcccttatgacttcatcacctcttcttaggccccacctcccaacactgttgcattggggattaagtttccaacacatgaactttgggggacagattcaaaccatagcatttagctagattgagaaaggaaggacctggatgtagatatcatgaggcattctttctctcttttccctctctaccacaccaggaattttaaaggcatagaaatgctaaagtttcctacccttgaacctcaaagatcccctgatgatgcagctgcaggcatcctggataacaatccatgagcaagacaagaaaaccatggccaattgctgatcccacgtgtgtactaactatcctgtaaggtaagggtttcttccttcaaccttacctccttaattagaatgactaccagaaaactaatctacaggaacacattttagcaccactaaacagcagattaatgagccagtctgttcacacgagcttaaaaatgttttccagtttgcctctagcaatttctctctgaacatcaagccatgtaggatggatgctgcgaatccccagctgtgacccattttaacccaggtattgaacgtgtttgaggaattggattaactgccttcacatgacaagacaggaaagaaaacatttttcagagttgcattttcttaagtgtttctgacccactgagaaactgttcctatttattcatctctcaaattcatagtgggcatttactagtgttgggtactgaggatacagaaatgaaaagatgggtaaggttttagccattgagattttatttgttcattctttatttgcttccttatcccatgattattgagtacctactacatattatgctatttttcaccacagaatagtctaggctgtttaaaactagctattgtataccattttggattatggaacgatagtagtaaacaggtcctatctctagcttatattataatgagtgaaaacaaaattaccggatgatgagaaatgctatgcagctaattaacacagagtcacatgcttaagagggactgtgattactttagaatgggtgggcaggggaggctaagatttgaggggcatgaaagaggcagttacatgataataaggggcaatagtatttcatacacagaaaatagcattccggacaaaagaaagaactagtgcagagtagtgtaatgcagggaaaagtttggtatgtttgaggagaaaaacgaagggcagtgcaccctctgtctcagaaatctcaattataggtatttatccaaggtaaaaaaaaaaaaaaaaaaaaaaagatagcctctgtacacaaatgtgtatgaatagcagccttatttataatatccatcaagtggtgcaaggacaaactaactggggatcatccatgccatggaatacaatctagcaattcaaaggaataagcatgcagtaacatagatgaatctcaagaatactatttagtgaatgagccttatgcaaaagagagtacatactatatgtttccatttatatgaagttctaaaacaggcaaaataattctatgctggaaaagaatcagaaagattgttgcaatattaagctctatttcaatatatactgatataattaaggagaaatgtattgatgtctgcaatttgctttgaaatgcaccaaaatatatgatggattaatagataacagggtgggtagatggagagatatatgatatgataaagcaattgatttaaaattttagtggtagaactggcactggtttaaaggattactgtaaaatcctttaaacttttcacattcaaatttttttcatagtaaaactttggaaaagaaaagaaggctagtgcagctagagcatactaatgtgatggagacaagtactgggcaaataattcacacaggtaaatgcattttactgcatgtttttcattaaaaatgattatttcttttcctccattcaattgtttatatggtttctagttaattaaatgataaatcctgtagtcatttaacattttcttgatgcagattgatttagcaacaacattcaatgtacatctactgtgcccctatactgaaggaaataggcaaaaaaaaaaaagtctgagtcatttattcctgctaacaagaagcttgcaaaaatagttgggaagatcggaccaactcatatgaactaatcagagaacaagataggatagataaaaagataatgctatcataaaaatgggatttaaggaaggaagaccctgtcaagaataatgctgaatgggcccagaaagatagacaaatttggattcagctatagaatttagatactaaatggagggaaggtgttataagttctcccagtcacaatgtggtgcttaacaagtacttactatgtgctaagctgtgctaagcacattgcattaatttaacaaatatttatgttatccccaggtgctaggaataaaacagagcacaaaatttcttgacctcatgatctacttgtggggagaggaagtaacagtcgataaacaataaataataaaataaataataaataaataaaatatcaaatttattagttactagtaaacgttaaggacaaacaataaagcaaggaagaaggccataaagtgttaaggaagagacaaaattttagaaaagggaaattctcattgagaagaaaattcttgggtaaaaaacccaaaggaattagagagctgacaatttgggtatcatgagaaaagcattgcaggcagacagaataaacaactacaaaagtcttaaaacagtagcattttaaatacattaaagagacatcaaaaaatgaataatacaatgcactatcatcacaccattgcccttcagcctgagcaatggagtgagaccatgtttcttaaaaaaaaaaaaaaaggaaggaaaatggataatacattatatctcccttaatatccacaatcgtcaatcgtgtgggctgtgtactagaatcaatcacattttacagatgagaaaactaaggcacagaaatgttaagaagcttgcctagatccactcagaacaagccctcaacaaaaccagtcaagaccatgtcaaaacaaagttgtttaagttgttttaatgtccaattttggtctctctactcttcatattgtagatgcaagagttacaaggagggaaaaggagaaagatctgaatattatcactgatcaaaaaagcaaggcaaattaaaggaaatcctgactaacaaatgatttcctttgctggctagagaacagaaggtcagctaggtcaaccaaaagattactttattcgaacagatgaggattatgagtaatcttaattcagaagaaccaaaataaaacacttccatgaaggggcaaagaataactcttacccaagtatgatgagtacataatgtcaggaaggttgctgtttcaatcaatatatgacaaatgaaatgataaaggaaatctggctggctacaaatggaccatacaaatgcatcacaaaaaaactcaaagcctgctgttatggactgtaagaaatgccaggagtcttgtaattgtgagagagagagagagaaagaaagagacaaagaaaaaagagaaagaaagaaagaaagaaagaaagaaagaaagaaagaaagaaagaaagaaagaaagaaagaaaatgaagaggaagaggagaaaaaaagaattccatccatactaagtattcgattcaaagcaacaattcttacagattcttcatgtctgcatgaggtgaataaaagatggcccttcagcctttctctttctatccaccccacaaataaggagaatatccggagactaaagggctgaattaaggtcaaaatccatatccactgagtccctccaaattacagtagctttttaagctttgctcagtgtaataaatcatttgacattaattctggtaaccaatatacaacaaaatttcttttccaacttccctagatcagctgctgttgagtaggggttttgtgtttttttcctatttatgatcctttccaaacatttttattttccttaaccaggttatgttgttcccagtgagtcccaggctcctttccgaaggatgatatcatcacagacccagtagcgccagctaataaaaatctgttaggctgccaatcttatcatcacctctggcacccacacccactatggtgatagcccccatgtctgcttacttgagtccccttatgtgccccatttatcatctcaatagtacaccatggcattcagaataatctcaaaggtcaaagaccaattgctgcagagatggagatattaaattaaacccatgtcttggcagaaagcctcagaagaagaaaaggccagtgacaggaactaaggctctcattaatgtgttgctgacttgtcacttttatgaaactcttgtaaggagttgaactctgatttcaagaagaatacaaggcagtgaagttccagaggattttctctaatttttcttgccacatcttactcaaatacatttcttcttttttcccaagtttatccaaaaaggtagcactaaaagaatgtgaagaatgacaagaaagtctttattaagcatttgtctgcctgaagcattgacacttgtcctcaggaagtttgcagtttgtgaaaatatgacgcaggatttatgtgaggaggcgtgtttctgttacatctgcatctacagaaaatcagttgatggtgtccatttggacatttctgttcttggtataaaaagcaaaaacaaaaacaaaaaacccatgagtcaattcttttaagagttatttacatatcaaagtgcatatttaaacaagtatcctttgtaataagtaaaaatttaaatagaagaatggatcaaaaagccaaactttgccaagcctatcccttctgataggctgatgatcccaatgaagacaacagctgtcagttaagtccttactactgaaagtgtggtccttagatcagcagcctcagcattacctggaacctgagtagaaatgcagaatctcaggccccattccagacctactgagtcagaatttgcattttaacaagatctccagatgattcatatgcactttagggtacaagaaaaacagagttaaatgaattaactgtgagttctgaatgaaacacattgtcacagacacaatctgcttgtttgctcatcattggcagatataagctgatatggcttgcgtatgcattgaatgtacacactacattcatatgcatgtgaattgacatggatcacatagatgacatcatggctgcctctttagcaaaactatgcagttaaggggacaagtgagggaggacagggttatttgtcacagagaggaactcctcagcttattttagatgatgctctcttttcagagaggctttaagctgtaggtctaatcagcttttccacaaagcccccaccagtctactcaccctctgctgaccccaggaccttgcctagataatttattcctgaggagcagtctagtagacctctgatgtccttcctctcatgattcagagagcaggtgtgtgatgcccttgacagctgagggcccttctctctctactacttctatgaaaagccatcttcaccacctgcttctgggtgacagaccttctgctcaccctggctctacaatgggtgaggagtcagtgggagtaagacctcaacaagcacactgtccttgaattatattacacaaaccatcataatgccatctttttagtatgcttcctgaagcaaatgattaaattaaaattcagctgatgtctctcttctccatccaagtttattgggatctgggaaagtaaaaagttacttgataggagggagcaatatagatcctgattaaaaagacaaggctgctgacagctaggggccatggaagctgagatgctgaaacttgccggcatcagcattttaattgcaagatggcattcatcagaagatgcccccaaattaactaacctgaaagagtagaaggggagagcaatgcaggggctggctgaccctgattaaattggatttcatgatggaaatgatggtctcctcctctctgaatggcatctccctcctatcctgctctccacacccttctgtcagcattgtctccaagttctaaatggcttcaaaaaggcaacaaagcaggtaagtaatctaaaatgagcatcatttaattctcttctgtgaaaattacaaaaaaaaatagatactttaaaaaatccattctatatctatgtctatataaaatgtatcttctgattataacacacctaagcaaaacaaaagtgcatttttcggtatattttttaaatttaggaaagcatatagagaagaaaatcaagataacccttaagctcagagataactgatattaatattttggtgtattaatttccagtataggatgcatgtatgtctgcatatgtgtgtatgtacatgtggagagacagagacagaaagatgcagacaacaattttcagaaagacagagaaatttgggatcataatggatatagttttatattctgctaagtttacttagcattgtattgtgaagattttaacaatctgatgaaaaaggttttcacactgacattaaaaaaaagcaagaactcaagttaagctagcctgtgaaacagtattaagaaagaaaatgaaacaatttcctgaactaaaacattcctgatggtttacaggaaatatgttacccttaaaaaactacagctactggtataaccaacatcaagaaatttcaaatagccagagttggacatgagccactatggttaagcatttggaaacgaatgtaatagcacattcccagtggaactgcaagaccatgaagctattctgaagaaatctcatgttagtatagccattacctcaaatcctttctataactcagaggtagaaaaaaaataaaggaccaacaccactagaatagattcttttgggctcacttacatccatttttctctccttctgggcgcaaaagataattcctcttttccaccttattagtggactactggggccatgtgactaatttcagccaataagatgtgaccagaactgatgtgtggctcttcaatgacaggtataaaacagaaacagcacccagttgctctctgtggtgactatgaagaaagccttgttttgaaatggcaaagccaaagatcaaggcagtctcttgaaccactcataccagaggacaattgccctggagagccactcaattatattaagccactgggattatctgtcaagttagcatgacctatcctatcctaatagtcaccaaaaaacaacaaaacaatgaatgtgccatttttacatatatatatatatatatatatatatatacacacacacacacacacacacacacacacatatatgtttatatttctatcatatatatataatagctataggctactatactttacaaaaggaagacaacaatctactaacacatcctttttctccatctgttcacctgattatacaggattggtcaacatgtgtgaagggaccaaaagcatgagggagggcagaattcaggaccagctgacattcatctattcaagtgtttactaaggacctaccacagggaaaccactttgcagggggttttcaggataaggaaattatagtcattccccagtattttcaggagattggttccaggacccccacatatacccaaatccacacatacccaagtttcccagtgggtcctctggaacctacgtataaaaaagacagccctccatatatgcaggttttgcatcctgcatttaattgaaaaaaaaaatccacttctaaaagccctcacagttcaaacccatattgttcaagggtgaattgtaataagaaacagtccttgcctcctggaagtttgaagtctaacagagaaaacaaaacataatactacaaagattagggtacttttaacagccgtatgaccctggggaggttattaacatctctgagcttcaacatcatcagctgtcaaatgggcaggaaaacagcatcttccttgctgcagttctgtgagaatataacatccagtacaccatctgacaaagagtaatcactcactgatctcaacgtattgttgttgttttatttacctgcaggggatattaccattactaacacagaacttgttcctccttctatttaaggaaagtggcccctcactgactgtcaaaatatatgatatcatggaaaaagcatggctatgcaggagtcaatccagagatgaagaacctggacacaccaccatgggccataggacatctgaagagttcagtttcctcatcaataaaattgagataataatttcttcctcttagggtcattgcgaagaaatcaagcatataacttgaaaataggaatctttcttactcctcccccgcttgccttaagaaaaatgaacagcatagaagaagcaaagcctgtttacaacttaggctctctctaagtatctacagactgtgacattttgagagaagtttacagcataacaagcaagatgtttccaaatcaggtctgctgcattcctcttccaaaatcatacaactcgaaatcttctgttgcctgaaactataaaattgtgttcattgttatccacaatatttctttaacctgacataaacctttctttccatttttttttgttgttgttctctgggctgagctgttgtgttaaaaagttgattgagaaataaattgccttgagaagcaatgagcaatcagaagtaactggatttccaaggtcacaatggggcatgacgtgcccagaccgcaaaggggcagtgtggagcaggatttgttatttcacaattaactagatgtgagaagacaccaacctgatactgtattatctcatttgctgctgattcaagaatggaatgatatcaaaaatgagttctaaaagaaacagcacatcagagttggatgtaattcccctgctgagaagctgagcctctgctataataaaagctcctacaatgacagctgctcatttctgctggtccagggctgttatcctttattttttgttaatgatgactgtgatgtgctcggcacctctaccaggtggatttttctagaatgtatgatccattcttctcttgaagaaatgaggaagaagagctaagagtatgatgttgttctagtaacagaaaacagggcaagggtcttacagagttcatgacttgaagcccaaaatctggaaaagtaatcatttccctgtcttcacttctttttgaccccagaaacctaagcatttagttcaaagatgagacgtgactcaaattatcaagtttaatcttcaagggactgttttctcctattctccaagcagcaactctggagtcagacatgtctgcatgccaagtaagagtacccctactgactcactttatgaacctcactgaatccccaactccatgcttgcaaaatgaagaaaacacgacgtaagtattaaattgttggaagtattaaatgagacgtgtgtgtgaaatgtttggcagagttgctgcacgtgtaagttgcacgttgactatctccacaatttaaatggtatgccttggagttgtgccatgtgaaacctgcacaaccatacacagcagccctttttttttttcattcaacagttcattcattaaaacattcacatgctatgtttccaagcactgtattcaactttccttagtaagccttaatgaattattcatcataaatttattctaaatcaattcttggattgccatgacacctgtcatgattttgtattttctgtctcacagtcacttgctcatgtgtcacttacccaacacacccaccatcattgccatattccagggtttctgttcatcactgcacccgtcttccctaagcaatcagcacagagtgtggcacaaagtttgttcacaatggatagctccaatttgaatggcacatttctttgttggaggcatggctggaatacattgtgcatgtaacctcctggaaagcagggggttttgtctctgttttcactgtggaattcccagtccctagatcagtgtctggtacacagtaggtgctaataaatgtggaacgaatgaaaagctggagtcttgaagatgttatatgggaatgattcagtttcttggaatatgacttattatttcttattgaatgaggattgaatgaaggtatacaaaatgaaaaaaatacccacacccagtctcgagtgaaatggagtaaatattaggtgtaacaacctaactgttgaagagtaatctaaaaatatcaattctagagcagacttggtatctgttttatttaaggttcatatgaagatattgtgttgataaaaataatatcatttatcaagtaccttccatgttttgcaacttctaatacattatttctaaccttaatcacaatgccataatatagctattattcctattttaaggacaaggaaacaagctcagagaccttaagcaactcatccatgctttacatgcaggaagtgactgagctggaatttaaacaggttcatctggccagaagccccatgatgtttccatatgaagaaaagagtatatgtgcacatttgtgcacatgggcatgaatgtgcacagacgtgtacattttacactgtcagctatgggttcagtcagatatgcccataaattcttttatgaagaagagctccctaaacttctaatgattttttcctggtggttttatttagctccaaaaacttatgtttttttttcttaaaaaaatcccataaaaatattcattatcaatacatcatattgatgatatcactcaagaaggagatgtctcactctaagcattattataaaaattcacaggcagtccacttttctagaaaaatatgccagtgatccttctagccttttgcatcctgggattattaaaccaggctgctgagcagccttaaaacctgctctgtgaccaatgctccgggctgtttattttggcctataactctcaaagttgatgggccctgccctcaggagggagggtatgcacacagaatgcagtgggtcactgcggagctgcccacatcctcttacctaatagaaggtggacttcagcagaatgcctgtctggagtcagaggtaagagctggcactgggtcacatggctgctctgtctctgtctgtggcatatgtcagggtctgcagggtgttttattaaaggaaaaaaatgcaatagcttcaaggcactagctctctttcccacaaagccttggtctatgtggagtcaagatccctgaggaacctctgctcctgggggaggggaggtcctgttctgtaagcctccagagctcatcacagcctgtccccatccctccatgcttgttaaacacccagcatggttttcagaggccatgttgatgccatatgttcataccactgaagcattttactgcctaagaagaggcacttagcacagggaagagcacattgttttcatagctggttggctcttaatacttccccaggaagctccaggttcaaagagagggtgtctgagaaatttgggaagatgccagcaaggtgaaggttttcaatgacacactccaggatgtcagtcaggcagggagaatgacccaggtcattcataacagaatttttgtacaaaagaggagaaaaagaagagccagtggaaaaaattatgtatgcagagatttcttctttagtggcaggtaaacatttagttatgtaagtaactctcacttaatcaggactaattttgtcccctgggggtatttggcaaagcctggagatattttaagttgttaacaactgagttgggaaaagatggggaagctgctattaggaccaagtaagtaaaggtcagggatgctactaaacttcctataatgcacaggatagccacacaaatgattctagggcccaaaatgtcaatcatgctgaagttgagaacccttgggttatgttaactctaaacagataaggaagtgccctctttgcctgcagcctcattgcactagcaattaaattagccacattcaaggtagtatagggaggcatggggcgtgtctttgaaaagtactatcacctggctataagttccgagtttaaatcttaggtgcagaactttctagctctatggccttgggcagattgcctaacttcagtgaatctcagtttcctctttggccaaatgcagacagaaccagctacacctaacctggcgtgaagtttaaattacatgggatgacaagaaagcatttagcaccctctctacacacagctacaaataaccaagcactgattattatggtccaacaaagtgggaggaaaaacgaacaaaatatggtttttaagagaaatctaccaaacgcttcaataatctgaggaaattttagcttgagtttgacagaaatctcaagaatgctgagtcgtggcctctttctttagagggttccttgactcctgcaatgtgagcctcaccatcatgtactcacagctcacagggcacctaattgacatttattattgttgctttgctcagcctgggtatctggacacttgtgtccaggtccccattttcagtggccaggcataaccccagtgatggcccggtcagggagaaaagattgtcgatacatgatacttaggcaaatgttctcacagtgcatgtagtcagaggggccgtgactctcttcattgctccaaagctgagcaaaatcaggccagacatagccacatctgcctttggtctgacacccctcctcccactttatagccaatatctgccttaatgctgttacttctagttgttagagtcctgtccttaggggaactcaagagctcccttttttccaaaccccaagaacttcctggcacatggcttttcctgatagcttcaaaggcaccccagtaggggagcaccacacagcatgaagacagctgcttacccaacctgcacagactgtctcaaaggacctccaaattaaagctccaaggctagaaaatagcttggaaaccatctcctctgtttttcttagctggggaaactgaagctcagaaacgggaagggataggcctgctgctagcccatagggcgactttgtgcaaattagcaaagtcaccctacatggatggaggcactcttgagccaaagtgaacagcctgctgagaagaagagtcccagagctcaggcccacagtagatagatcccttgtgctttagaaaggggtttgctcaaaatcacaaaaacgagttggcagagaactgggatcagattgacaacctctttgcacagacaggattaactacatatggaaaacaagtagctcctgagctcttgcacaggattccttgtaaaaaagcttggatttcacactccgttgctaagttttccttgtggcccttttaatgatggaaagggaatggcaaacaattgccacatgtacattccttagagacatttcacacatagctggtggcccagaaaaacctagtacctgcaaagaaatgaggaggccctagtagctggagaaggggaaaccctaatcgcctagttcagaatcatcatttaagaaagcaaagtcaaaccccaaaagacagttttgttctgaaattgtaaacagccagcatagaatagctatgagagaatagggcctcatttcaaagcaactcataacatttttcactactgtaatactgcatgtgacttctgtgatgaaatcatattatgaaggacaatttcaattgggattagaagaaacatataccacagcttaagcaacaggagcctgtgtcaaaagtgttccagttaacacatcatcccctttgttctacaggcaaccttattactcttatcttatcctttcatattctgaatttccttttctgtagaaccttggtgatttctgccccctgtattgccttgggaagacttctttctgttcctttatgggactggcatgtctaatctttaggtcacaggtcagcaaactttttctataaagggacagatagtacattttttaggctttggggcccatatggtccctgtcacaactattcaattttgccattgtagcacaaaagcagccacaggcaatatataaaatcatgggtctatacccttgtattccagtaaagctttcttttgctttttcgttttttttttttttttagacagtctcgctctgtcacccaggccggagttcagtggtgcgatctccgctcactgcaatctctgcctcccaggtttaggagattctcctgcctcaaactcctgagtagctagaattacaggcatgtgtcacgacacctggctaatttttgtaattttagtagagacggtgtttcactatgttggccaggttggtctcaaactcctggcttcaactgatctgaccaccttggccttccaaagtgctaggattacaggtgtgagccactgcacccagctagccttctttataaaaaggtggtactagatttggctccttggtcacagtgtgctgatccttgctctaggtggtactgggtgtgggtgggcagaacctgagctcagcttatagacacaagttgtgaaagccaccaagaggctcctgggcaaatagaaattagcaggtaagatggcaatggtgggaagtccttcatctgattctatccttgacatcattaagctgacaagaaaattaaactgagaagattgatgtaatgcagtaagaaaagggacttacctggagcatggatgcttcattctaagatatatccgaacactagcttccatggcatctgtctaagtactatgacattaataaaccaagagtctgctagtcaggtggtctcctttacatttcttcaggatactaaaaagacaaccaccaaagagaaggtcctaataacagcggcatatttaagaattcatgtatcttggctgggcacagtggctcatgcctgtaatcccagcactttgggaggctgaggcgggtggatcagctgaggtcaggagatcgagaccagcctggccaacatggtgaaaccccatctctactaaaaatacaaaaattagccaggcataggggtggacgcctgtaatcccagctactcaggaggctgaggcaggagaataacttggaccccagaggcggaggttgcagtgaaccaagatcacgccattgcactccagcctgggtgacagagcaagactccatctcaaaaataaaagaaaataaaaagaattcatgtatcttgtatttatttaggcaattacattgagttaaacctgaataaccggaagttttattttgtttttgttgttgttgtttttaggagtgaataaaacacaaggaagatttctcagagggctagggtctggaagacattacattgaccacatgctttaccctttattgggaacaggaaacctctgctcatccgtaaccaatagacagcagcaggaagtcatgatgatatatcttcagacatcacaactcttcatttgctaattatcagaacccaaggtcaactttttttcataattaaaaaatgttcagttccccagattagaccataattcctccaaagtaaagatggcattttatacttcttcatattattacatccttgcctagtattttagaataatataataattgctaacattttgggaataattattcagtgccaggcactattcaaaatgttttaagtcccttctcatttaataacctcacaacaacctatgagctgggaactcgtattattattattccatattgacaaatagtggcactgggacacaaagagtttgtatatcttgcccaaaacaatgcagctagaggtggtggatcccagatttgcactcaggcatcccagccctagagcctgtggtcctaacttctgtataatgctgcttacgataatgcaaccaatataggtgatcaataagtatttggggttgtcagtagtgactctgagaggagggaaaaaaacaaacaaagtctgagttgaagctcagccaaattgtgcataattatcagtaaactcctcctgctccactctcccatgatgtagagaatgttaccctttcttgagggctcctaaacacagctaagctctaagagtggcagctgccagtgaagagtcttggaagacatgtctgcagctctgtaaagaaagcccctccttcaatagctgcaggctggaaggccctgggaatatacctacagccaggaatggagcaccctctcagagccttccctaaggggacatgggtagaacaaatgacccctgggccagcctactcctccccccgaatgctcctcccacccccactcctcatctctctctctccaagatcctgtttctgagaagggcagggaacaagcaccctgactttcctagtgaccgaggtaagggctagggtcgcctgaggaggaggagggaaagaaagaggcaccatcaagcttgggctagaaattatgactttgttcattagaccacttgattttttcctcctcagtatccagattatttccattttactttttctttctttttccgttaaaatgttttaaattctatacactattttaatctctctctttgttctttttaacattgacatttgggagtagaaaatgtagtctaattatagttttaattgcattccatggtgtatataaggagggttatatttctattgtcttctaatatattgtgttcttggcttctgtcattcaaaaaatagttatttaatgtttttgagcaataggatagcttttaattattttagtattatatacttccaaagtcattgtatcatgttaggagaaagtcgtgtggaaaaaaattgacttttgtttaaccaagaatattttaaaatggatcctattatttttgtaaaatatctctgtattcttaaaattaattttatctcttatttttaaagctttttaaacttctgttaaatcacttccaatgaaatatggaacaaaactgtttgatttattctgctgctcaaatatataatttatttatcattgcattctttgcctaacatatttttataataggttacaaagattctctgcatctaattatttcagagtcaaagaagttatactctgatcctggtttatctttaatctgctgcaaagataatttggctcaaattattgcacatctctgggcttaggtttttcttatttattggctcaaattattgcacatctctgggcttaggtttttcttatttataacacagagagttaaataaaataatatcaaaatttccttttgacaacagcattctaggagagcttacagtgaggcttacatttaccagcaggcatatcttcccccttcctttctgctagaaggtaaccctttcaaccaagtttcacctgataaaagaagggaaggaaagctccaatagactctaagaatcaactgctgtccttagaaggaaaaagagtcctctcttctaattccttagacatacacactcacacacacacacacccaacacatatatcatatacgatatgatgtcagaatgtaaacttttcaataatcagtcaaaacgtaccaattaagaaatgtgtatcctaagcagctggcaaatatttgataaaaggattgttttctttactcgaggacaaaaatcaaaaggccacaagcagagggacctcaacaacctatatctcccaagcaatgctgctgatgaggctaagccattgaagggatcaaatggaacaatcacagagaaatgccagcctcagagggaataaacagaatcttcaacttctacagctaggctgaaaacacagcatctcagctggattttatgcaagtcatttccataaaagattcagacataaaccaagaattggggcttctcagacacctgaaaatatcccccatggattggggatattgaaactatatgatttgaattggtttcagcttataaccatacatttgctatgaaaacatccaaaaacacaggtgaaataaatgtacatatcaatgagtaagaaaattggagacttttccagactatataattggaccatgtaaaagacaagataacttctaagattctttcaatcctgagctgtgcaatacaaataaagcaaaaattcactagcacgccacgtattacaccctggattgaactcaatcatactagaccacttaacctaggaattccaaacgaaattcttgactcccaggctctctgagatatccattgtgtcagaccattagcctcagaagcatgctttggcttaccctagatcttacaaaaatcaaagtttggaatttcaaccaccgatctaggacttatatttcaacattctctcttcaacttagctttccactgtcagcaggtttttgcctgcaacataaagtgaccaatctactgatcaagaatgggtctgagatagactagatggctcccctgagcccatcaccagctgaagagaaatggcatttgggggacactgaagaggagatggcagtgtccaggagtgaagaagtcagaggaaccctgagagagaaaaacaggttctcctagaactttaccttgaaaaactggggtaacaaaaataaagaccactgcacttttacttacatcaattcctggattgaaattttctctcctctttgaatattaaaatcctatttggaaacctagtttactctccttctctataagtctttctcaaacccacccatctcacaaattggtccgttctcaggactcaaaaggcttctccttcatccatctagcagtcatattcacactgtcttgcatcatctcacattcctgtttggtgacatcatgtaactataacactattatcgccttttcacatgtgtgtacctcaattcttaaatttaattttaaccttcctcagagtgaagtccatcactattttagatttttttctctaaggcagcaaattgcatgtggtaggtgttcaatatatgctagccgatcacatgactaaagaaggcaagcaaagaagaaagaaggagctggggaaaggtaatgcaggacaaaaatgtccctcggtagccagaaggtagacctgttgtgaaggaaaagtaatcaaaattccacacaagctaataagaaacagtacatggtaaacaactgaaaatgtctgttgaattgaagaaaggcggtaaggaatgagcagatggatataaaggaagaaaagacgaaaggaaatgataaaagagaagaaagtggagacgagaagggaggagtgagagaagatgggagaagggaagaaagagaaggagagaagaatagaaggaaggaaggatggaaaggaaaatggaaggaaagattaaaaaggagtggaagaaaggatgaaaagaagagtagggagaatggaaaaaaagaggaaaagaaggaataaaggacaagtcttacccttgtatttctggatcttccatttttatatacttgttccctttctatttccaaaatagctcttggtgtcttagagggcacccggcacctagttccaggctcgttgatgcacctacataaagctgtatgtgaaccacattcactctgattttgtgcttcactggccagcaaacaccatctcctgaaagtacagcaccaccgatcctgggaagtcagccccagaaaagctgcatttcaaggctcagggtgtagaactcaaggacatttgggcaaaagcctgggatgtcactggctctccaacaggagttatagcgggaggccttctcctcttattagtgccaaggcatcacatgacatgctcagcccaccggcttcctgggcagcccatcagggaatcagggctcagaggctccacggggtgggggcaggggagaatctttgaggatactcattggcacacagccatgcctccctcactgccaactccctgaggcgctgctatcactcctcctccacccacccctaaagacccagatgctcaactcagagtgtgcccccagacaacacaggaaggttggatgcccaaatcttggcaaatgtacaactctttgtggcaatcctaaaaaagagcctacccaagacgtctccatttgctcccttttccctctaacagaaatgccatagtgtgtgagtgttaatgtatatatttttaaaaaagaattttgccacatagaagacatctattgctgagaccaagaaggagttcttgatgggaaaagaaggtgtatgctttagggatgtccataaacccccaaaatcagatgcacacaattatgtgggcttgatttttctggttagagagtccatagtttttagcagtttctccaagggaactgtggcatgaacaatattttaaaactactatcctgtactcctgaggagaagcaaagcaagttgtcaggggtttgctaatcaggaaaagagtgattgattgattaatttgccaactgagtttcatgaaaatgcattttctagaattaacctattttgctaaaatgacaactgaattttgaagtagggactttcttcccctagcacccctcatctttatgtctatctgtctgtgtccaccagctctacagcctgtgtctgctaggaaagaccatttaaacttgtaacacttcattaagcacatttccaccaccatcacaactctctacattaaagcaaaccagttccaaatgggcaagccttggaaatgctctcatatctgcctatccaaactcatgctgcagaaataaaatgggcagctttagaggagattatggctttaatataccacatcattgtcatgaaattgaaaatatcactgaaagaataaccagggatatacatgaaatatttaagcatgccctaatatagcactgctgggacctgaagagtgattcgattgctacagaataaaatgaagcttaggaaaattagggcgatgcacttgagcaaccaccaaaacgtgaaataatgggaaactctgctttatcaagaactttttaaaaagctgtttgcagactctgcagctgttaatcactcttcacatatggcatggctgtcacctttatgaatcatgttttaacttgaaaagatttcctttattacctttccattttcacattcctaaggagttgtgaagcaaacaaaaaaaaaataggaaaagctctgaagttctcaaagccaggaacaatatttacaaataaaacaagcaagaaagcaagttgaagttttaaattatgtccaattttgtgagaccaaatattagcatcttcacttccaagctacagaaacagtctcatttcttattaaaaaaaaaacttctacactaagactttaccttgattgcacatgaaatctaagcccaccttggtgagtaagagaaacagtcatacagctattgttttaaagtttaaatcaatttgattcaaattaataggtacagtattgcataaatctgtgacaaaatgcatctgaaaaataaatttgatgaatgatgacatatattattgagacatataaagatctacatatacaggaataggaaaggtttacaatcatataatttgtccatttacttttaaaaacagaataataaaggcaactgataaaaaaaaattcagcattcaggaaaattcagcataatgctctcccttgacccaatgatgccactttactgaaatgcaatattagccaaattcatgcttttgatttgcagatcaaaaagcaatccctctgctttttgtttttgagtaatggttctcaaaagttctaataagaattagaactgtcagaaacaaaaagtctaaaaaggaacaaaggctgcccttcagccaagaggaccagataaagtctatttatgcaacattcctgtgtctatctgtctgtccgtgcccactagccctacagcctgtgtctgctgggaaaggccatttaaacttgtgacgctcattaaggacattctcaccaccatcatggatctctaaattaaagtcaaaccgattccaaattggaacttaaaggtacaagagtcagaacgcggcacaaattgcatcatgccagtgtcagtcccatcctgttcctcttacccttctcttcccaaatggaaaaaagtgacccgtcctgcacatgggagacaagagcttgtgaagggctttccccctcctcagccccaggttgttcactgcctgcctgctttcagccatcccatcctgccatagagagtaagtcacttaccacagatgggaggcaggcagggctgctccgtctgaatcccagcactctgaaggctggagtgcctgagaggaaaactctgggtacagcctgggattctgatgtggaggctgaggctggggctctgctcacaccttagcagagacagcgtgcctccctctaaaatgtctaaattaataaatgataaccccatggtcaaatctgtggagctgagctgagagaaactccggctgtcttctcaggaaagggggactgtgggaactccagttcctgaagggtggcatagtatatgctttgaattgggagtcagctaccttaatcatatcataaagcatgaacatttctttcaggatcacatgttttacactttttttccctgggggatggaaggaggacaataagagctagatgatcaccatcatctccacccctccaagtaattcatccatagctctccaactccctaaagagtaattttggaaaccagtggaagtgtgattttcacctatgattttggtacatgagtgaaggcactcacagcaggtcatcacaggacactgttaaccctagccccgcacagctggaacatgcccaaaattgcacccgcacacgaggaagtctcaaatgttgctgaacacaaacaataaacagtatgttcttcaaccccacttccataagccaactcaaaacaagcacaaagcacaactttgatgctctcaactcttaaatccccttttttctctccaggtaagattcttgatagcactgtgacagcagatggtcatgctttttgtacctgcctgataattccagctgatgctaaataaatctgactgatggtgattcaagagactgtggctgtcacattggcacactgggatgcagagaatcaaaagtgtttacgtttgcctcatcacctctcttgctaatattatgtagaatggtcatgcaagaaggatccttagagattaaataaaacacattgattttataaatgggtaaatggaacccacaccataagtcattcatctagaaatatataatcattcatgccacaagtacttactgtgtgcaagatcctcacaatgcatagcaacaaagttctactacttagctatttggcccatagttcatatttcagaataatagtcctttggattttttgaaccctatatatgtttcctatgtaggttcctggagatggccaaataaaaatatgctccaaatgcaggggttgtctaactttttctatcaggaatcagatagtaggcggtgcacatcatgtggtcgctgtttcaactattcagctctgacattatatggtgaaagaagctatggacaacgacaggtatgacagtatttctacaaaactttatttatgaaaaaagtgtgcatactgaaattgacacatgtgctacagattgctgatccctgttctactggatctcatttgacaatgaccttttttgggctgcagacttcaagtttgccttaatcagatcttaatttacctcaaacctccccattcatagaagttaaaaatgtatgtataaaggaaagaaatcacagaacaaggagcttaggaagtaaactttgtaaccacctattggaagtattcacaaaacacaggaagggaatcggattcacaaatagaactgtttctctccatccaagcaaagtggaatagaagtttcgatctaagtaaccaagaaccaggcctcccaaattggatattacctcttctccccagcatagggaagatgatattcccataggattaggcaggtccctattattccaccccatagaaaataactgtcaaccatttctgctgaagacagcaagtctatttccaggctgcttagcttgactggcaagtcaaatacagggcagacatggacatgtaggatcagaaggcaggtctggtcttccctgagcccattccctgggcaggggtaggtaagtaaggaacaaggagacccacctatcttccctgtttgtgcctgctttagagaaaaggagttcttaaaagcagccctagcaatctgtgaaaccaacagggttcatcattcagagtgagaatatgcattgttcccatggaaccattgagtcaaaatttgagaattcttgacaagtaactcacaacttcttaaagaataagaaactcaggtaaaagagttcccaggaggtggcccctcatgggacagcacagattcctgcttgatgttgcataaaaaaacaggtacaacttgccgtacaatcactgatgcttggaccttcctgcaagtgcttctctccagaaatgtatttcctgtacacaaagatgctatacaaaaaaaaaataataataataataatccatgctgcctgaggtcagctggcagagatgcttcacagtgaatttcagcttctactaaaatgacaaatgatcatctgcacttttttgacttgtttggtggtgagttgtgcctgatgtcaaacatctggataaaaattttaaaagttgttcagcaaaccagtgatttagatgtttggtgtcaaaaagaccaaacagtcagacaactatctgattccctgttttctaacttcttatccaaggatctgctacatccatataatcacagtaaccttactgcagcagcccccgtcattcgcttgtttccataaaaataaaaggcaatctgagttcattgatcaccgattgagaaccacatggaattatgtcagctccgattcagttgaatttactcagttaaacttaatgatgctataaagcattcagagtcagccagagcatcaaagtgtctgaacaaccacggaccattacacaccaagataaaatatctatagaacatctcattcccatcagacaacaaattaaaatgaggggaaagggctgtatttcagtcgttaacccataattcagctgccaacattatataaaagcctcacgcactctagtccaatcgttcatcttttttctcttgctttaatgaggcagcagaagtgatccctcagcctgctttctggggcttcctttgcagtgccgtgtacccagagaaactcaaacacaatgctgctcacaaacttttatgagctgttatcttcaccttcagctacatccttcaagggataataaagccactacatcttagtttggtccgtgattgatactttaattgttgctttttaaaataaataaagatttaaatatttcaaaaggcaattgcaaagcagatcagccttttttttttttttttttttttttttgagacggagtctcgctctgtcgcccaggctggagtgcagtggcgggatctcggctcactgcaagctccgcctcccgggttcacgccattctcctgcctcagcctcccgagtagctgggaccacaagcacccgccactacgcccggctaattttttgtatttttagtagagacggggtttcaccgttttagccgggatggtctcgatctcctgacctcgtgatccgccctcctcggcctcccaaagtgctgggattacaggcgtgagccaccgcacccggcccagatcagccttttatttagcaagtcaccatcacaagacatacaggctaaggcttaaaagaagcccttgggtttaaaacaaatgtttaggaggagatgagaagtttctcatctttgatggctacaaaaatcatcaaaacaaattcaggttcagagtctagaaaagatgttactatttgcagcatgggtctgatacagcagttcttaacgggtaaactgctttgttttaatttataatacagtaaatattgatagatttaatacacgtgaacaaaagctctttggggtcttcagtaatttttttttttttttttttgagacacagtcttgctctgttgcccaggctagagtgctgcagcgcaatcttggctcactgcaacctgtgcctcctaccttcaagagattctcctgcctcagccacctgagtagctggaattacaggcacacaccaccacgccgggctaatttttgtatttttagtagagatggggtttcaccatgttggccaggctagtctcgaactcctgacctcaagtgatctgcccaccttgacctcccaaagtgttgggattacaggtgtgagccattgcgcccagccctggggtcttcaatagttattaagagtgtaaagcaccctgtggatcaaaagtttgagcacctatgttttagtggaaggactgtacattttggagcaaaatggtttttaagggttttatttgtctcctctgtctcccacttgctgtgtaatcacagccaatttacttggcctctctggtcttccattttttatatatcaggctaatcacccttataattatttgctcaagcatgtcttccttgctgaaatataatatccagaaggtcaggattatgtctgtttcgttcatcccacattaccaaagtctagtacagcacattacatgatacatgatagggtctcaataaataatcataaattgattgacagggtggctgtgagtcttaaatagaataatgtgtataaagtgccccatgaggtacctggcagatggcaaatgtcataggtgctcagtaaatgccagatccctttctttaccactaatgctgttctcagtggtaccacacaggagacaaaattcatggcttgtctacataaagtaaatatttaaggcactggttcccaaagtgtggtgtccaaactagtagcatcagtatcacctttagaagttgttagaaatcaaattattttactcctaccctagacccactgagttagaaattccacaggaagggcccatcacttcgggttttaacaagccctccaggagattcggagattctgactcatcctcaagtttgagaaccatggcttgaagataatattttatgccagtaacattttagactttcgtaacagagagatacccaatatgttgtctaatgctggcagcctaagatccttttgggacaagggcaggggaaacaaagtcaaatacaataaatttctgctgctggtcttgtagggtggaatgattgattttgtattctggttgtgttcctggggccagtactaaacgtacctttcatttgaaataaagctggaaccattagaaacagaggaagttttatcttagagaaactccagcataacgcttgagtcaccttttgtggctgggcataaaatttgtgagtaggaacagagagagaggagaggaggaaagggagaagaagggtaaatgattcagtagctatgaaaagcatacattttgttgctgatatctaccataccttcataaacacacttctaattttcacaattcccctgcaacacagcaaaccattaccattagggtaattaactactaataagcctctagtttgtgagagatgccaccagcaaataaaggttgcaatttgagtaatttccaagtgacagcaagcttcacagccatcctataacatagacacaatcattattctcattctatatctatgaaaactgagcttcaacaggttaagcagagctgaaattcaaacctaggaattcctgacttaaaatttatgccattcaccaatacacaatcttacctacctacatacaacacacagaatagtcttgcaaatatagtggagcacatttgaggtgaggactgtgatttaaagtcaatgcgtaaagtacaacacacacgtagtcaaaataatccttgaaaaatattataaatttttcatgaagtacaatatatgttgtattacagatacaactatgtgcagtagtaatatgtcatacaacttcatatatcaatttggatgatatgataaagtcaataatcaaaatataataagaatatttttaataaatgagagcaggcgtagaatagattttgagtaagttaaaagcatgctttgcctggatgcaggatatttgctaagggaatggagatgcacccagagtgacagagggagtatcctatgtgccaaaaaagttctaggttctctggagtcatatcaagaagtgtgatatacaactgctacttggaaaagcttgcaacatgctacagacatggtcatatctatgaataaccatgttacaaggcacacaatgcaggggctgaagcatagccaggccaggagagggtatggtaaagagaattaacttcaacttggagaatccaagcccaagaagcaaagatcttatgaagcatggactggataaatgtgccctggtctgaattggaatagggataccctaaatttcattcctcttcctcccagttgccagtgctttgacaactgaccaaattatttataaaacagtactattaatatctaacccacagaatatacacttctagtgactgtgtatgtatttatatttatataattaaataattttatttttctgcaagataaatgcatattatctgaaataaattaacattactttttaaaagaagtactatatcccactttaaatcttctcaggatggatggagagcaaggttgggaaagtaggaaaaaaacattgagtgcatacatacagtgagtcaaggcctctcttctgccttatagccttatatatatggtttaatctccatttttacaaatgaggaaatagggacaggtttagtaatttccccaaagcaaaacagctattaagtgccagagccagcgttcaaactaagtatgcttacttttaaagcttaagcccttatcataacaaaacttaacacatatttgtctttatcaaactgcattgcaaccctgtgatttcttggcacatttcctgatatgagtgaggaagaaagaaacagcttatttcattcagtcaaccaaaagtttttgagcaactactaggtacctagcactgtttggggttcagttgtgagcaagacagagagagttctgaccccctgaagcatgaagtggagaggagagaggagtgtggtgtggcatgggccagagaagaaccccaggcccaggagtgaagaagcctttattctcactgctgtaactaggccaccaacgagcttgagcaagtcacttcaccttgctgagtctcttttttcttatctggaaaatgggaggggtgtgcataattttatgggattgccaagttctcacattctcttattccataagaggcatttattttcccatctttttaaaattaaatcaggttaggagctatcatgagtgttattagttgccaaaaaatcaactatttccactcttttcctcttatcgtgccttttctccaatacaattcacaatcagtcaagtcacaggacgtaaaggccaccaagcaaaagaaatctgacaatggcttctcgggagctctgcagtctacctggccagataacgttaacacacatgatcaaaggtgtccatccctagtttcacattagcacaatgtcaggtgcaaaactccttgacttttgccactgaaatttatatctctgagttacctgttgaatcaactgctccgaagataacaaagacatcacctcagtcatcttgcaatgctagtggctactaacatcttaaaagccttctttgtctttaatgataatgataaagtattgttttgggccattctattgcccttattatttttcatttttatggatatttgtatgaaatacacctttcaatatttttaaaacagagttcttatttagattgtttcagacccatcacttaatggtaaaggttcttggttatatttctattacatttccttccaaatcattttctgtttaaatgaattaagtcaatgatttaggcatttacttcatgatattgatgaaattactacatacagggcatggtgcaagttgattagattttagaatctctattagcgctgttaagaatacatacaaaccaaagtgcctgctgaatgagatgccaccccctccacttctccctcaaaattaccttctgtccacctgtttccttgaaatacagggagaggaaaaacaccttagtataacaggacttgtaaaggaccacttcccaggtcctttgagacaaaccaaatatctccttctttatctcttacctagcatcatttgttcatctttctcctcacacttaacagcacaatttcaatgtttcttttcaccagtctgcctgtgcctcaagtttttatgtttatccccagtgcctagcacagcttttgacataaatgctgtgaccaattattattcaacagatagatgaatgagacccttctgctgagggggaaggggtaagagatgggggaagggataagagatgggagaagaggcccatttaaaaataaaatggtgatagcaaataacaatcacagtgaacctgtgttaagctcctattgtgtgccaagcattgtatatattattgctaacctttaacaaaaaggaaaaatggcgaaagtaattttattttctcttcttatagatctgcactgtttcaatagggtagccactacccacataggagcattaagcacttaaaatgtggcaaatctgaattaaaatgtgctgtaagtataaaaatacatgctagatttcaaagatttagtactagaaaaaaaagaatgtaaaatatctcaataatctctatatcgattacatgattttttaaaattttgtgttaagtaaaatatattcttaatttttcttttttttttttttaaagggtgaagtttggggagaactcccaagagaatgggcacaggaagtagcatttatctacgcactaaaatgccagacacttttaaacacctcacatttacaacaattactagccccattttccagatcctaatactcgggttaagtgattcacccaaatgcctggatcttgaaaactgtagcccaaatttaaacaaggtatttccggattcagagttcttctgataacaggcccaagtgtaaggaaacaaagggcgatcagaccccagaaaggcctgtcacgaggagttttgagagtagtcagactgtccagccgcggagcaacctaaccaggcactggaagacaccaccagatgctcagggcaaaaccttttgtcccctctccgcagcgaggcaatccaggccggagagtcagatgcacctgagaaaaccaatatccccagggcatatcttggggttgggtcaaactccattccttatcctagaagccctgcttatgggtcccggaggttgactctgctagtgctccggcgccctctagcgattgtccattccaatgccagctctctctagtccgtccttctagactcaccagctcctagggcttgccctgccgtggacccctgccagcctgattttgctcctcccctacctcaaggtgcaatgaattgccctacacttggataagaaagaggtcttctggtcaataagccttaaacctgagctttctaaagttaatccgaaatactgtattttccccctgacatttccaaggagaaatttctctagtttcctaagtaataagaaaaacaaagttagaaatactgtgttctgagccaaagatgtaaaagcaacatttaagaaagtttgttctttttgaatgacgctttaatttaaaacagaataaaggattcccctgtgtgttcctggaactgtaaacactcataaactctctttgtttactttattgactcaattgtgacatttaaaatagaaagctaagtctatgcatgagcaattttttacagaacatgcacattaacagagatggctgcagacaatgactttgtacaaattcaatcacatttattgggtaaatattgcactggctccaagagacagcaatgtaataagtcccaagcctactcctcctaacactctaatggaggtgggagacacccccgcaatcatccctaactcatacttaataaagatcagcagtgcacatggtgccagagattggctccactgctgtaattatctccagggaacttgagtttctttatgaggggagtaatcagaagggttgttgaatgagtctcctgattttgagaagtcacttatttgagctttagtttccacatttgtcaaattaaattgctagagtcagcagatgatccccaagctctcttccagttctgagagtcatagaacatgcacattaacggagatggctgcagacaatgactttgtacaaattcaatcacatttattgggtaaatattgcactgttgaaagttgctgatcacagtttagagatgagtccatcacagatcagcttaaatgggctccccttccagccctatgactaaaataataggactggaataaactttcccaaagaaggcatccttatcactttcttatttttgagacttgccttccaaccctcaatatttactgagctaaaagctgatggttcccaagagggtttccaaagaatacagcagacaaataaaggacttcccaggatgtgctgatttaggagaaaatatatccaatatatcacatatatttagtagttcatacagcaaacagaaagctcccacataactgcagtttctagtacagaaaaagaaaacctgaaagtatatgtaggcactaatatgtttttattatgcagtcacaagtttaggagatattcactgagtttaacactaattgaggccttactatagactatttcaaataacatagaaaagatgatgcatcttacctgacccatttattgtgcttgatttttggatttaccatcaactatcacataaatactttatccaaaaaatggatgtgtaaccccaacctaaattattatcataatgtgcttccctgaaaagaaaatattataagattttggggacatcttaaaaagaattaaaatcagtaatctattctttgccatctacattcaatcaggagaaaggcaactgtattattacatgttggaagatcagttttaatgcaccaaagaatggtcttgaactatgtgacattttattttgaatgcatttaaatttttctattttgatattttgtaaatctagtgtactggctactgttgccaaggaaatatgactttgggttactgaatggatctgcaaaggtttttgtttttcttttaaaatattaacaagacaaaaatggaaagatcaaatatggaacacaaatttagccctttctctcttcaaagtgcacggaatacagatcttcttacacaccactgattaaaaaatacaaagatgcatgaagtgatttttcccaactagtgtagagacttttacccaattagccaagttgatatcatcagagtacctgtctcattctttgttctggattcagaccactctgaaaatgtgtggtattgattacacacaacactgacggctcatcttcaataagttcatctctaaatgaaaagatcctttctttatgtggataaaggtaacataatgttctagggtgttacatttcaaagaattttcgaagtgaagtcagaagaaggcatagtgcaaaccttataaatgtgttcagtattaattccaaaagattcaaatacatatgagaataaagattccaccattaacccattttttttggtctgtgattgtttcttatagtcagtataacctcaaggttttaagtcataataatgggcttgaataatctaattatttaaaagaatcaaagcttttttctattgttttggaatattacataaaacttctctataaacagataacatctttacttcctactaactgaaatgaggtatttttaattagaaatacacaagcagattaagtatactttagaacaaacaccttttaattaaaacctctaaaaccagagtccccttaagacaaaccaataattcaccaaaatgtcatgttgctactggagacttggagataaacaggaagtcttttaatttctttttacacttaagaaacaactcagagcaactattttcaaagaaatatttaggaattttagtaaagcaactatctcaaactgggaagtcactgtaccgcatctgtgccttctcccagtcaaatatgctgggcctgtgtctgggagaataaaaataaggttgaccactcacaggaaaggcataagtttgatggccatgggagtttttacttgttaacacataagtagaggtttggttcaattataggcaatctcttctcacacaatcatacaaaactgcccaggattaaacatctactattgctatagaccaatatatccttttatgtaatgttaatggaaaagtcacctcattctgatgtgttttgagtttgatcctctaaaaccataagaatcttcccatgagagatagttgagaaaatgttggcctttattagtatgcactattaacacaggtgttctgactgcattttccaaccctccctctattttatgcacctctctacatgtgagaacttttgactaactctgagtcctgacctgccagagtgactttgtcagtctctctttaaaaatgggcaggtgaatgagttcagcctagaagcagcagctcggtaagggaaatgaaaatatcagaagttatctaatcacagccatagccatgctgagcttcatcttatcttttggttaataaaaagaaatgggaccttccgaaacttgaagggcatcaaattaagtttttgcttgcctctggctttttgggggatatgctatgtggtttaaccagcatatactaactacaaaaattgacatggattcaaaacacctgtgtcataggacggtgggtgtttgtttttttgttttgttataaagcagaaaataaaacacaaaggcctttgagaacagggattgttaagggaatagaagagtatggagaaaagaacactttatttgaagttaaggtaattgtgtacgcctgtgtatgtgtgcgcgcgggggcgcgcgaatgagcaggatttagtttcatttaaagataacatattaaagtatcttggacagctcaaaagtgctgttcaggaaacaaaaccaagtgagccaagaaaaaccagaacagtgcttttaaaatccctggcaaagcagcaagaggatgaagagttggttttgcatagttttgaacacagggtgtaaaggtgctgaggcatcttttcccacaagtcactgaaatcctgtgagagtgtgtgagtgtgtgtgtgtgtctgtgtgtgtgtgtgtgtgtgtgtagagggagaggttctcagatgtctctcttgcaaagcttcccagagcactctcgcttccctagccccctcccgcctcactctgctcacctttcccccctccacttcccaaccacccacatcaagcccttcatagatttgcgccccttggatcatctctgccgcctgtgactttccctggagcctagcaggttctggggctgaaaggcaatccgccaaggcgccctggggcgccgtcagatttggaacatagaatgggaaatagggccttaaagcccacctactccaagatgaaggaggagcatttttcatcagggtttagcctgctcctcaccggatggtaatcagcactcgcttgacttggcgtggaccacctcctaattatctccattggattcagccctaacagttctcgtgtgtctgtgataccacgcggggtcgtgatctccttactcagctgtggcttggtttcagtggtccctccagtcccgtcccctgtccccgtccccctttccttctggctactttattccatagaggaagaagcgctgaaggactacgttgaatcaaagcacttgcaagcctattcattagtttttaacactgagaagaggcaactaaaatattattagaacctcattgtaagaagtgtgggggaggaggttgagaggctgaatccaaccgcagccaggtcaagccattggaagggactacaatgtcccacagctttctcactgtcagagaggaagctgcaacttcagccagaactcccttcccctccccttccccgattttgaaaaccgtaccccttcttccgccttcgggacttccctgacctatccctcacccgtgccatgctgtcccctcccctccgcggtctttctccccaactccattcgccccaccccacctgggcgagttgggtggatgtcagaaggcgagaggtaggggatggaagtcccttcagattaaagacgttgcttgctgctgctttttaaaacaacaacagcaatgacaaacgtgcaaaggtgagcgagaaccagtgcatctcaaaagttggtcttgctacgcagcagctccaacagactttgcaatcacagcgccccaggaacacaggaatgaagagttggcatttacttacctgggtgtgccaatctcgaagagtggagagagaattcagcccgggacgaggtctgtcccgcccccaggatgcaaaatccggctttgaagtggaggtggttggtgtggtagttttgtactgatgtaaggggcgtcgcacctccttcccctctcgtcctccgaggtcagtttagcaacagcggctgggaaaggtgctgagagcagagttcggtctctccggaaaccctgactccattctcggtgatgggggtgggggaagagggtgaaaatgttggagatgtcaggtcggctctcagttaactcggagagtaaagaggagggtactgagaaaagagggagggagtggagtggagcgagggaggaaggaaaggagggtggcagaaagagaaggggacgagcgggtggcggggagatggcagcttctcacagagagatttccaccttctgacgaatcccatgcacccagcaacccggcaagagactggttccgaaacctccgcgcgagcgccccctgggggttgctgacggagacgagcattgccccgggaacccgagctcaggccccgcccaggccttggcggcggcgctctccgtggtcctgccgcgcccgcagtctgggctttctgctcagctttgtcgctcaactgagctcctggggacacttgatttagatctccaagtgcttggtctccatctccactctagggtggagcggtcgtatcgcggcgcgggtgtggggggaatgggagttacactttttggcactcaccaaagaaaacttcttagatgggtgcttaactgtcaccaaaaatggtaaaggtgttgctaatctctggatccttcgtgtctacaaaactgtctggcgtatggcaggagcctggaaattatttttagtaagtaatgcatgagtaaattaatggacaaagagtattttcttcatctcatgatgagtttctgaatacatctacctcacaaataagataaagaaatacttagggagtacttatgcttaaagatagatataaatatgctgtcttatgtaaggggtgaccacttccacatgttttaaagcactttagagagaaagtatggccttcctatttcaaacttattcaaattcagacaaatgaacttattcaaatacagggcattgtttctgattatgtctgctaccatagacaaactagacaactaaattctctctgcacattggtattgtcagactcacaaattggactttggaattaatgaagtaaagtgaatgacggtctctttctgacattgggatggtatagagtgtgttacatctaacgtggaggggagatggaaggtcttccttctcaccctattaaggggctatctaacaaagcctctccaacctgaaggttggaggagatattagccaaaatcttttcactaaccatgaagttctcaatttcaaagtccagaaaaggagaaccaatagggtaaggaggaagaccccctcttaattgttctatagaagtagacagaaatatctttgataaacaaagggacaaccttctgacagaacacaaataacatttttcttctttcagtcacctctaaagcctttctgaaataggataacactaaacatggaccctggaaaggacctcagggagcttctctgtacactgaaactaccacagaaatccttggatttgctttgattgcaaaaacttgggtcacatggctatgcataagtcaatcgttgtgacctttggatatggaattacactaatgggccaggacttccacaatgtctaggagcatgtgatgtcttctatagcactcctggagccaggatggagccccacctgatctacacacattgcgagtgagacacagggacaattctccaagggatattcagggtcctcctaccaggaaaggggagacggatgctaagcaggcaaaaccagtgtatgactactaaatatgaaaatgttaagtccaaaaacattacttccaggttttgttaagaggtagcctcagagataaactcaaaatttgaattggattgaacttgcaaagatgaaggaagaagaaggaaaagtcattgtgcatttccttgcatgttaattgtatcctctaaaatttaatttctatgaaggcaagggatatgtctgttttgtcgtcttgttcataattataaccccaatgcctagaaaggtgtctaccaccttctacatttataaaattaaaaataatataaataccttagggaccattcaacataaacttcttatattacaggtgagagaaaaggaattaagatgtgctgagcatgtactatttccaggcaatctgttaggcactctacttaccatcccatttaatttttacaacaacctgcccaagaaagttttactatatctacaaaaataaatccagggtgtgggcggttgaaatgaccagaccagggaacacaactagttaatgggaggataggggttgttcattgaagcagtctctaaaggggcagctagaataagtgaacacatggaccatagaaaagaagttatagagtcaatgctcatagggaaaaagaaaaacaacatagttatctttggccctacatgttaaaagcatagatacacaaactaaacacaatgccacaacttgtgacaaatatggtttcctttgccagcaggcttcagctccgtaattagaaacaaacagttgcctgcatgccagtgcgcagaaaacgtgcagctttatgccagaaacttggaatttttttctgaaggcatgacactgaaggtaaattcaaagaagctttttacagggcacataaagcagaatttacttccacctcttatatgaaatcaacagctcatctgtacaaatgaagatttgtaaccagctaataatccatgttttcaatcactgcccccacagcaagttgcccgccagccacagtcccctcaacaattgtaacatcaaaatccccttgtctctatcactcacctcctcccagctctccttttaatggattctgagctgctgggttctacagccatggtcaaatttatctaaagccaagccacaaagtcactgtggccctggtgttcccaagttgcaaaggaagcttcagctctgggtagattcactcgccgggtttctgtttgataagataagaggaggcatccgctcagtgtcttatgccaatatgaaaggcatctcacccatcagtgtgacaagtgaaatcctggaatgaagccagggaacaaaagggaagaaatgtggattcttaccaatgcagttgataccattttttaaggggagcagatgatgaaggggaaaaacaggcagagagtcagtgccctgcatcaaaaaccttggatccttccctgaatgagtcagggtgagcatttagttttgaaatggaatttctgtttccttttattttctttcttttttttttttttctgtaagaactactaaaggaaactgttgtaaataacaggatatatttttgaggctgtggatcatataagaactttgaatctcaccccagggctatttatagctcaaaaatttgttctttttttctatttcaagtgatttttgagaactgactgatatgtcttcctctggtgtttctgtatatgcctgaggtgtgatgtattactggaaagcagaaaggaacactctaagaaagcactttttctaagatgctaagagtcaagggaaaatgaacatacatgttgcaagctgatgcaggaattaaatattccactgtctgtcattcctttttatgagaaccctataccacctgtggtgcctctaacattgggtaacaacctgtgctacgaaagggcagtttatacttctgtctaccaataggtggcatcaaaatctctagcttttctttcctgtattttaaaaaccataggcagagggcattttctttctgagattttacattttatcatgagtgatgttataaaggccactaaatagctctgtataatttcagagcagattttcctattgctctattaatgaggtctctcagttgtccctctgagcctcagttttctcattgtaaaaagaaagtatttggattgaactccagctccaagattctgctttttaactacataatatcttcccagacacaccatttttcatgcctatgataaacccattagcactccattcctctgggcttaaggaatattagcaagcaaatatcccttggttgcagaggctgttatctgcccagcctatattcatttttgtttgtttttccttactaagaaaaacataattttgtggagggtagcaacgtgtttagctccaaaccttcattttccagcttttcttgcagatggggtagtgatgtgattaaggtctagccctgcactatttattgtggtagccactagacacatgtatctatttaaatttaaatttattaaaatcaagtaaaattaaaagttgattttgtcagttccacaagtgacattttaaatgctaaacagtcataagtggctagtagctaacatcttggatagttcagatatagaacatttctatcattgcagaaagttttgttatatagcactgatctagccattgagatgagatgtcagtagaagttatagggcagtttctgtgagagttttcaaagagaaggagatactgaatcagctgggatgtacctttatctctttacctcttcctttctttctacctgaaggttacagtaagtcagccatcatgtgactatgaagcagcaagcatttgccaaggcaggttaagcagaaagataaaaggaacctggggctttgatatcataaaggcaacaacattattgtcagctgtattaggagaaaaataaagtcttccattgattcaagctactgttttcagctttttattacaaatagctaaatattatttctaactgatataccatcagaaacttacctggacaactttctattaatgactgaaaaagcgtgtgtctttccagtttcctttactttggttagagttgaggactagactctggatataagaaacaaaacaatgtgtacaccatgaagtgataagtattaatcattcatttcaatatgtccaatggaccaaaaaaggggcagatgggtattaatgattcccaaaataaatatcccctgttttaaaatttggctaaagagtagctttgcattttcctggaaaagaggttggtgggaaaaaaaagataatatttgaacctgtactatatgctagaaacttggctgaatgatttgacattatcctatttaatgttcatgacaatccaataacgtaaccactcatatctcccttttgtgcagataacaaactgaggcccagagaaatcaaatatgttgtcaaaatctacatcgttgaagagatgggtttcaaatccaggtcggcttggcccttgccacgacttcataatgaaattccatgggtgagtgttaccagtttctggtccatccttgcttatttcaagggtctcatcatcccatccactgtatcactttttttgttacaggctttactcttttctaccatggaaaagactaatgatatttttttctccataagcttggaaatattatcaatcaccataaaattcagccttcctctggtaactttggagaccctcagagcttttcttatttccagagacaggcggtttggatgagaattattctcttttttcacacaaattggccagatgacatctttactggtatctgaaatagaagcagaaaacaacttggaggacacaaaatgtgaaggttggagaaatagctttgaattcaaactgaaattaaatagtttcctttgttgaaactcacagaggaaaacaagttacctaaaaaacttattaagacttttactagaattcatgagataattgtaagataataaaaaagtcatgtaaagaaaacctaaagaattcaaagagaaaatgagaggaaaacaacatcattgcagatcttaaaatcacattctgtaaaaatcagaaatgaccatgcagaaaacacagagcagtcacagagggcaaagtaagtgatgtttatggtgacctgaattgttaagaggaagttcaaatatattctgagttactgattaagaaatcaaaaaatgttttataaatactctttccaaaagatgattaaattatttagaaatcaacccatcactaagatcagcctagattcaaggggaggaaacatagacccaccccttggtgagaggaatatcaaatgattttcagatgttttaaagccaccattccctcagtcctaaaaatgctcagtcctttccagctacctgtttctaatgccctcagtatattaaaagtacatgagatgtatatgaaataaagatgttctaggcaaatgtataactcttaatagcagtttggagattaagcccaagtttctgtctggtctctttcactagtcaactgagtcccaagttctccttgtgccccttcagtgccagtgcagattcctacaacaccctttgtcctagatccccaccctacattggctatatcaagagtatcagtctatcagcaagaagaaaaaaagtctctctccagaaggtttagagcataagacaccctcaattccatttggtcttcttccccttgaacgtcaccaggggcaggatgcactctcatccccacctacggtggcagagggaaacctaaacaatctacaattctcatgctttttcctgttctctctcttagtttatttgtgttgctttaacaaaatgccataggctaggtactttataaacaatagaaatttatttctcacagttctggaggctgggaagtccaagatcaaggcatcagcagttttagtatttggtgagggcctggtctctttgcttccaagatagcaccttgttactgcattctccagaggggatgaacgcagtgtcctcacatggtagaaaagaagggagggcaaaaagggccaaactcagtgtaaaacccctttcataaaggctttaatcccagccttcatgacctgatcatctgctaaaggccccacatctgatgctattgccttggggattaaattaaatttcagaggacacattcaaaccataacaatatctaacatctagaacattacacagcagtacctcgtgaaaagacatagtctttttcttcattgggtttatgtttaattaggggacaagaaataaacaacctcaaccccacgtggctattgcaaaaatgaggtaacccatgaggaaataaagaggaagaaaacctatatgtgatcagaagagtcagggtagacctcaaaaagcagacaatgcagaaactacgacctgtggaaattaatcaggcaggttagagaaaaaggctctccagccaaggaagcagcatggacaaaggctccaagtcaagcacagacaaggcataatcaaaaaacctcaagcaattaaataattcactgtatctggggcataaagacagaaggaaaaggagcaagaactgaggcaaacaagcaggcaggggcataaatacaaaggaccttgtaagattgacttgagattttattgtattccatgaaatatttattccaatatactgagtggtaattcagaattttccataatccatggtaaaataggaaaaacaggaagcattttatataactaaattaattttttgagagtatatcttcatattttcatgttaatattagtcactgcattcttgtcattaattctcatgaggctttgccattttaaaaaaaatattcttacttgatagaataaaagtcctgtgagccaagagcaacccaagaaatgtgttttgaggtttgctctgtgaaatctaaatatttggacacatcagcaagaggtcatgggaagacattaaagaattttgagcagcaagtgtgattaatgttaaactgggagagggttgaagagggaaagtaaagttagagaaatgagtaagttacctccactggattcattcaatagatattgagctggtgttagggatacaatgatggaccagctaggtaaggtctctgcctcatggagttatcactcaagtcatggagacacaaaatgaacaaagaaggagagacaaacaggttgggagtcatgtagagggcagaatgtgggagagaaagatagtgaaagaaagaacatctgtagattagcataagttctgtgagggaaataaaagtctaatgatataagaagtcactgggaaatgcctctttggatagcatggtcaaaaggcctctctaaggagagagcatttgaatagagaactatcagatgagaatgagtcagcacacaaagaccagagggaagatcactccaggcacagggtacagcatttataagggcccagaggtgagaaaagttctcaatgatcagttttaatagtttggagaagagaggatgaggcagtttgagcactccaaactgcttaaaggtgaaaggaggaaaggaacatgaaaaggatgcagggaggctttaatgttacagaagactggtgttgttaattttattaaataccgcccaaggtattggggttgacaaaatattgtcctagttcttcaggagatcattgtccagtgcaaaccactgcatagaaattaaccctagagggataacccacaggaggttggggatttacttccatctataggctagagataaggtcagctcccatttgacatcaatggaaaggaaaacctctggattgcacacccaggctaccaatagcagagagttatttctggagaaataagtctacattgatttaaaggaacagatgtaaagcaagaacaggatttacctcagcagattctatcctcccccataggacccactctccccatcacttctgttttcttgatgattcttcaggcttggcctgcatctgtagttaccttcagcagctatagttaacttcagcatctatagttaccttcagcatctatagttaccttcagcagctatagttaccttgagctaaataatttcatatgtgtcatttggttatatgttatcttgtttattccttgcaataaatttagaagacatcactagccccattgtctttgtgtactccttctgatgggcagtatttttctgatgtgtgcagtttgtcccaggaagggaaaacttcttcctaggtcacagggttcatctgtgcggagcaatgggccttggctcctgtggagacaaagtaaactgctataacacgggtgggccaggccacaggacacttcagggcaggcaccaggataaaaatgtcttcttcacagggttgaggttaggcagtatgctgagtttttaaaccacatttacatatagatatttttaaattgttaaatgaattcttactatatattcttaggcaagcagcctttttatgtctatattaatctacatcacaatttataatagctagaaaatatcccaatatatggatataacaagaaaaatgcctaacttaatcccctactgttgagcatttgtttctaattttttactgttgtgcacaatgcttccatgagcatggtttatattaggtactcctgattagaccctagtctaatttggccaaacctaaagaatcatcaagaaaacagaagtggggccaggcacagtggctcacacctgtaatctcagcactttgggaggctgaggcgggcagatcacttgaggtcaggagttccagactagcctgggcaacatggagaaaccccatctctacaaaaaataaaaaaattagccaggcatggtgacgcatgcctgtaatcctacctatttgggaggctgaggctggagaatcacttgaacccaggaggcagaggttgcagtgagccgagatcacaccatttcacttcagcctgggtgacagagagaccctgtgaaagaagggccaggaaaggaagggaaggcaagagaagggaagggaaggaaggggaaaagagaggaagggaggggaagggaggggaggggagggagaaggaggggcagggaggggatgaagggggagggaggggaggggaggggagggggaaggaaggggagggagggggagggaggggagggaggggggaggggagggggaggggaggagagtggaggagaggggaggagaggggaggggaggggagggggagggagggtgatggagggagggtggaggggaggagagggggaggggagggggaggaggagggaggggagggggaggggagggaagggtggggagggaaggggagcgggaggaaaggggaggggagggggaggggggaggggaggggagggggaggggaagggaagggaaggggagcgggagggaaggggagggggaggggggaggggaggggagggggaggggaagggaagggaagggaagggaagggaagggaaaggaagggaagggaagggaaaggaagggaagggagagagatggtgagagtgggtcctattggggaggataggatccactgaggaaaatcctattcttgctttacatctgttcctttaaatcaatgtagacttatttctccagaaacaactctctgctgttggtagcctgggagcacagtccataggcctgcctttccgttgatgtcaatgggagctgaccttttctctagcctacagatggaagtaaattcccaaccaaggggctcctgtgggttaaccctctggggtttccagcagaattgcccttaaagtgaatcaccggtgatcaaagcagaccaaagtaacacattatttctctatagaagagaaggtgaagtcctgtcattctgaggctattcttggtggagggaagaaatcataagaaaccaacccaaattgagggacattctataaaatctcactagccctccgcaaaactgtagtatcattataaacaaggaaagactgagaaactgctggagaccagaggataccaagaagacatgaaaagtaaatgcaatgtgatcccctagactggatcccagaacagaagaaaagacattcgtgggaaaactggttaaatccaaatacagtctggagcctgcttaatagtaatataccaatgttggcttcttaattatgacaaatgttccaatgcaatgtattctgtttacattatgggaaactggatgaaaagtatatgggtactctctgtactctcttcccaacttttccataaatctaaaattgtcacaaattaaaactttgttcttaaaaaagacaacttttctgtttgttaccttagggtaaaattagaatagttgagtcaaaggctgtgcataatttgcaggtttttgtttcattctgtaaaatcactaggatggtaatttaacttaatccattatttttgcttaacttctgaagtaaaagccctactgtatctgcttgtcatatgtaagtcaaccatctccttggcaaattacacaggaatacactcgccagttaactcctggcagaactcagagagaatattgatgagaactgccagagaaacagtactctgcctacccttctcagactagcaggttctctacaggcaagagaattaagaagtgactcggctgggagcggtggctcacgcctgtaatcccagcactttgggaggccgagacgggcggatcatgagatcaggagatcgagaccatcctggctaacacggggaaaccctgtctctactaaaaatacaaaaaattagccgggcgtggtggcgggcgcctgtagtcccagctactcaggaggctgaggcaagagaatggcgggaacctgggaggcggagcttgcagtgagccgagatggcgccactgcactccagcctgggcgacagaacgagactctgtctcaaaaaaaaaaaaaaaaaaagaattaagaagtgactcaaaaaactcccaggaatcaaggacagagccagaggaagccatttttacatagtcgtttttcttattgcaactctgctttctgcgtttttccagcagccctgcctttaaagtgaatcaccagtgatcaaaggcagaccaaaataacgcattgttcctctagagaagataaggtgaagtcctatcattctgagggtattcttagggaaggagaaagagaaagaagagcaagagagaaaccacattgcctacattttctaaaagcaaggcctgtaattttcctcttttgaaaatctttttaaaaaacacttgcctattgaaacaagcgtaagtaatgctgaggcatgtattaataactttatctgttctgtttctatcacctcttcctactgcaatgtgcaatggatgatctacagtgtttctggtcatgctgttagtatatatagaaagggacaaattaacaggtatggagcatctgtgagtgaggcactgttctaggaaccttcaagatggtgtcatcaaactctcacagtaatgcagggtaagagtttggaaggcttcaaaaattgtcattatttttcccccactccacatatccatgccttttgtagtgtgcctttgtggctcttaccatcaagtagaatagtctatttctacacccacttgaatctgggctagccttgtgacgtgtttttaatagaatgcagcagaagtgacattctgccagttctgagcctaaacctgtaggaggtctagcatacttccatgtagccaccatgagaacaagcccaggccctctttttggaggatgaatgagagatgggctatagatgagccattgtgactgaagcccaaacctgtaagacagcccaggcaagattaggaaaccaacccccagtcaaccctcggttggccataaacacttgagtaagccatgcccaaaacagctgagccagagcagaactatgaactaacaagtgtttgttattttaagccactgactttgggaggtggtttgctgtacagcaatagttaattgatacaagatgatagtcttatttccttttaagataggatgaaattaaggcatagagagatgaaataatttatccaaggaggcacagctagtaagtggggaaactcaagattcaatccaagcactaaataaatctaaggtttcttcttccactacaacctctgccagtagaatggaaacaagaagaaaaactaacaaaaccaaatgtcatagctatttaaatatgacaaaactgaaatcacttccccagctgtcttctggatagtatgtaatgtgtgtgcatctgtatatgtttgcagagaacaatctattcaatggagagaatgaggtaggttagagagagctattttttaacttcaaaaacatagtctaaatcaaatgcattcatcttggtgtaaatctgtaattggttcatgatgacaactggactgtttttgacaaactaattttcctctctcttaaaagcaaggcacttgggacaaccactcagcactccttttctttctccctgtgaggctctgtcttgatcttccatcttttgtttggagtctctcttcaatccttttccctttgtctcctttgcttattctctgactctctccatctatcaaaacttgtttaataacagcttagttaatccctgatggccttatttcccctgacttctgcatttttggtaacttattttctggtcttgaatttgtctgtccctagtttataactttcaaattgccttcctttgaatgagcaataaagtgaattagatcatgccatttctctgcctaatacccttcaatattttcccattgttcctagggtcatctgaactccttagcctggcctgcaaggtcctgcatgatccagtcctttctatttttcctgcttggtctcattctatgaccctctctagttccccaacgtctgtgctctagccagacaaatttctttcttcatttattttttctttccttctttttttttttaatttgagtcactgtttccctctgtcaccaggctggagtacagtagtaccatcatgactccctgcagcctcgagctccagggctcaagaaaccctcctgcctcagcctccataggtgctgggactacgggcatgaatccaccctacccagctctcgcgtttgtttcagatatttcaacctctgtttccaagccttcccacatgctgtttcctctctgagaatgccttttatgtgcatgtgcatgcacgcacacacacacacacacacacaacaatttttggctgattttttaagtatttaaagaaatttcccttctgctgaaagcttcccttgaatctcctaaatgataatatgtttattattattatactttaagttttagggtacaggtgcacaacgtgtgcaggtttgttacatatgtatacatgtgccatgttggtgtgctgcacccattaactcatcatttacattaggtatatctcctaatgctatccctcccccatccccactaccccacgacaggccccagtgtgtgatgttccccttcctgtgtccaagtgttctcactgttcaattcccacctatgagtgagaacatgcggtgtttggttttttgtccttgtgatagtttgctgagaatgatggtttccagtttcatccatgtccctacaaaggacaggaactcatccttttttatggctgcatagtattccatggtgtatatgtgccacattttcttaatccagtctatcattgttggacatttgggttggttccaagtctttgctattgtgaatagtgctgcaataaacatacgtgtgcatctgtctttatagcagcatgatttataatcctttgggtatatacccagtaatgggatggctgggtcaaatggtatttctagttctagatccctgaggaattgccacactgacttccacaatggttgaactagcttacagtcccaccaacagtgtaaaagtgttcctatttctccacatcctctccagcacctgttgtttcctgactttttaatgatcacctttctaactggtgtgagatggtacctcactgtggatttgatttgcatttctctgatggccagtgatgatgagcattttttcatgtgtctgttggctgcataaatgtcttcttttgagaagtatctgttcatatccttcacccacttgttgatggggttgttttcttcctgtaaatttgtttgggttctttgtagattctggatattagccctttgtcagatgggtagattgcaaaaattttctcccattctgtaggttgcctgttcactccgatggtagcttcttttgctgtgcagaagctctttagtttatttagatcccatttgtcaattttggcttttgttgccattgcttttggtgttttagacatgaagtccttgcccatgcctatgtcctgaatggtattgcctaggttttcttctagggtttttatggttttaggtctgacatttaagtctttaatccatcttgaattaatttttgtataagatgtaaggaagggatccagtttcagctttctacatatggctagccagttttcccagcaccatttattaaatagggaatcctttccccatttcttctttttgtcaggtttgtcaaagatcagatagttgtagatgtctggcattatttctgagggctctgttctgttccattggtctatatctctgttttggtaccagtaccatgctgttttggttactgtagccttgtagtatagtttgaagtcaggtagcatgatgcctccagctttgttcttttggcttaggattgacttggcaatgcgggctcttttttggttccatatgaaccttaaagtagttttttccaattctgtgaagaaagtcattggtagcttgatggggatggcattgaatccataaattacctcgggcagtatggccattttcacgatattgattcttcctatccatgagcatggaatgttcttccatttgtttgtgtcctgttttatttcgttgagcaatggattgtagttctccttgaagaggtccttcacatcccttgtaagttgtattcctaggtattttattctctttgaagcaattgtgaatgggagttcactcatgatttggctctctgtttgtctgttattggtgtataagaatgcttgtgatttttgcacattgattttgtatcttgagactttgctgaagttgcttatcagcttaaggagattttgggctgagacgatggggttttctagatatacaatcatgtcatctgcaaacagggacaatttgacttcctcttttcctaattgaataccctttatttccttctcctgcctgattgtcctggctagaacttccaacactgtgttgaataggagtggtgagacagggcatccctgtcttgtgccagttttcaaagggaatgcttccagtttttgcccattcagtatgatattggttatgggtttgtcataaatagctcttattattttgagatacgtcccatcaatacctaatttattgagagtttttagcctgaagggctgttgaattttgtcaaaggccttttctgcatctcttgagataatcatgtggtttttgtcattggttctgtttatatgctggattacattgattgatttgtgtatgttgaaccagcgttgcatcccagggatgaagaccacttgatcatggtggataaactttttgatgtgttgctggatttggtttgccagtattttattgaggatttttgcaacgatgttcatcagggatattggtctaaaattctctttttttgttgtgtctctgcctggctttggaatcaggatgatgctggcctcataaaatgagttagggaggattccctctttttctattgattagaatagtttcagaaggaatggtaccagatcctccgtgtacctctggtagaattcggctgtgaatccatctggtcctggactttttttggttggtaagctattaattattgcctcaatttcagagcctcttattggtctattcagagattcaacttcttcctggtttagtcttgggagggtgtatgtatcgaggaatttatccatttcttctagattttctagtttatttgcatagaggtgtttatagtattctctgatggtagtttgtatttctgtgggattggtggtgatatcccctttatcattttttattgcatctatttgattcttgtcttttcttctttattagtcttgctagcggtctatcaattttgttgatcttttcaaaaaaccagctcctggattcattgattttttgaagggtttttttgactctatctccttcagttctgctctgatcttagttatttcttgccttctgctagcttttgaatgtgtttgcttttgcttttctagttcttttaattgtgaagttagggtgtcaattttagatctttcctgctttcccttgtgggcatttagtgctataaatttcgctctacacactgctttaaatgtgtcccagagattctggtatgttgtatctttgttctcgttggtttcaaagaacatctttatttctcccttcatttccttatgtacccagtagtcattcaggagcaggttgttcagtttccatgtagttgagcggtttggagtgagtttcttaatcctgaattctagtttgattgcactgtggtctgagagacagtttgttataatttctgttcttttacatttgctgaggagtgctttacttccaactatgtggtcaattttggaataagtgtggtgtggtgctgagaagaatatatattctgttgatttggggtggagagttctgtagatgtctattaggtccgcttggtgcagagctgagttcaattcctggatatccttgttaactttctgtctcattgatctgtctaatattgacagtggggtgttaaagtctcccattattattgtgtgggagtctaagtctctttgtaggtctctaaggacttgctttatgaatctgggtgctcctgtattgggggcatatatatttaggatagttagctcttcttgttgaattgatccctttaccattatgtaatgcccttgtctttttttatctttgtctgtttaaagtctgttttatcagagactagcattgcaaaccctgacattttttgttttccatttgcttggtagatcttcctccatccctttattttgagcctatgtgtgtctctgcacatgagatggatttcctgagtacagaacactgatgggtcttgactctttatccagtttgccactgggtcttttaattggagcatttagcccatttacatttaaggttaatattgttatgtgtgaattcgatcctgtcattatgatgctagctggttattttgctcattagttgatgcagtttcttcctagcctcgatggtctttacaatttggcatgtttttgcagtggctggtaccggttgttcctttccatgtttagtgcttccttcaggagctgttgtagggcaggcctggtgatgacaaaatctctcagcatttgcttgtctgtaaagtattttatttctccttcacttatgaagcttagtttggctggatatgaaattctaggttgaaaattcttttctttaagaatgttgaatattggcccccactgtcttctggcttgtagagtttctgctgagagatcagctgttagtctgatggacttccctttgtgggtaacccgacctttctctctggctgcccttaacattttttccttcatttcaactttggtgaatctgacaattatgtgtcttggagttgctcttctcgaggagtatctttgtggcattctctgtatttcctgaatctgaatgttggcctgccttgctaggttggggaagttttcctgcagcatgttttccaacttggttccattctccccaacactttcaggtacaccaatcagacgtagatttggtcttttcacatagtcccatatttcttggagtctttgttcatttctttttgttcttttttctctaaacttctcttctcacttcgtttcattcatttgatcttccatcactgataccctttcttccagttgactgaattggctactgaagcttatgcattcgtcacgtagttcttgtgccatggttttcagctccagcaggtcctttaaggacttccctgcattggttattctagttagtcattcgtctaatcttttttcaaggtttttaaattctttgccatgggttcgaacttcctcctttagcttggaaaagtttgattgtctgaagccttcttccctcaactcatcgaagtcattctccgtccagctttgttccattgctggtgaggagctgcgttcctttgaaggaggaaaggcgctctgatttttagaattttcattttttctgctctgttttttccccatctttgtggttttatctacctttggtctttgatgatggtgacgtacaaatggggttttggtgtggatgtcctttctgtttgttagttttccttctatcagtcaggaccctcaactgcaggtctgttggagtttgccggaggtccactccagaccctgttttcctgggtgtcagcagcggaggctgcagaacagcgaatattggtgaacagcaaatgttgctgcctgaccgttcctctggaagttttgtctcagaggggtacccggccatgtgaggtgtcagtttgcccctactggggggtgcctcccagttaggctactcgggggtcagggacccacttaataatatgctcttgttatatgcctaccagtagtctatacttatgctactatagcatttaccaccttgtattgtatttgctggcttaattgtctgtattccttaacttactacctatttcatctgccattctatacccgaggctagaatggagctttgtacacagtagactctcaataaatatttgttgaattaataaataatatgttgttattcttcttgcatgctttaaccccaaaacaaattttcataattcttagtactagtatacaagaaagcaagttggaatatttttggttataaggaacaatgaatgcagactagcttaaacaatcaaggattggttggcttatgtagctagaagaatccagagacaagataattatcaaagatggttttatccagtaactctggttctgttttctctggcatactgtgatatagctgcaactgctcaggctacacatccacaggtccaaggggtgagagaaaacactcccatccaaaaaccctaagcaaaagttccaaggtttgttctgattagatcacttaggccacatggccagtaaagagccagtacagggaccagggtaatataatatgctgatggcttaagcttcccactccccaaataattgggttgtgcagggaagtatggcttattgaatacaatttggaatatcattaaaaagagagagatgggtgctggctacagctaataatgagtctgcatttgtcactacatatttttccatgactacattcatagtgatttacagggcatatgttgtatatccatatatgctgagatggtatgggacataccatcttattgggcaagatactacctctgcccaataagaacgtaagttccagatggcataactcttcttctacccatcatttcagatgcaaacagaagtttatttgggattctggacgagtggagaggaggaattacttgtatggctttgcccatttgaggattcaacatcttggtaacactcagtttttatgtatattttttaaatgctggaattttatgaaaataacagaagacttatttgagtataactgaacccccattagaagatgagatctctatatgttttactatatcactaactgcagtataaagaatatatactcatagtatcatgtttgagttccattgcctctgctatgatttgactgtcctctccaaaacccatgttgaaatttaattaccaatgtaacagtattgggagatggggcctttaagaggtgattaggtcatgagggtggagccttcataaaggtgttaatttttatggaagtggattagttatcccaggactgagtttcttttatcaggaaccctctcctgggataactaacccactttgaccccatttctctctctgtctcacatacttctttgcctttccaccatgttataatgcagtaaaaaagccctcaccaaatgcagcctctggatcttggactttccagcctccagaactgtcggccaaagaaattgctgttctttaaaaataactcagtttgtggtcttctgtaatagcagaggaaaattgtctaagacagcctccttcccagaaactgcaaaaatcctaagcaaaagttccaggcatggaagtaggcataaccaagtgaatttccttcagtgtggtctggcctggatatgctatcttcttacattatatgggttctaatgagcttcttctcagcatcattctgtgatgtaacagtcctcatagcatggctgccttaccatgactggcagaaaatttttattctcttgattagtaaccactcgaagttacatttcttaatgcagaggctttattgactattttttagagcagttattcaaacatgctctgctaaatccaaatgctgttgctcattgccttgggaatggcttctctctgtttgacctagttttccattcctatatttctctaactggaagtcactttatttcatctattctgcatcagtgaaataacatttaacattccactctttcaggatagaaagggtagctctcagatttgtcccgaatttaaaaagttatctgccttaggcagaaacatgactctttctaaactgaccacagaaacatcctctctgcctttattatctcagagattttactattcaaccccagactaccaatttttttttattattatactttaagttctagggtacatgtgcacaaaatgcaggtttgttacatatgtatacatgggccatgttggtgtgctgcacccattaactcctcatttacattaggtatatctcctaatgctatccctcccccctcccctcacccaacgacaggccctggtgtgtgacgttctccttcctgtgtccaagtgttctcattgttcaagtcccacctatgagtgagaacatgtggtgtttggtgttttgtccctgcaatagtttgctgagaataatggtttccagcttcatccatgtccctacaaaggacaggaactcatcctcttttatggctgcatagtattccatggtgtatatgtgccacattttcttaatccagtctatcattgacggacatttgggttggttccaagtctttgatattgtgaatagtgccacaataaacatacgtttgcatgtgtctttatagcagcatgatttataatcctttgggtatatacccagtaatgggatggctgggtcaaatggtatttctagttctagatccttgaggaatcgccacactgtcttccacaatggttgaaccagcttacagtcccaccaacggtgtaaaagtgttcctatttctccacatcctctccagcacctggagtgacttcatttccaccttagaaaacagcacctgttgtttcctaccaatattagcaaggtttacaattaaagtcaccacaagtaggataaaaaggatattggtcaggtcatttaagagtgtggttcagattacaggtttgtaggaagagattcaatacataatacctttgcttcttacagatatcaaatcaactagacatcaaaccccatttgtgtttgctaagtactctctcatccataaaaaacatggaacagtagtacacagacactacaattcacagcctctaattaaaattgccacaagtagcaagtttatttatttgaggttcatttattcttcctgaatgcctccttcggggaatcatagaagcactgaatcaaaaataaatgttgaacattgtccttcactcaacaaatagacactgagcacctgttatgtgtcaagtactctgttagtcactgaagatataaagccaaaaacagatagactgatattttcatgggtggcagacatgaaacagctctaataaaatatagtgaaattgtatagagaatttgtaagctgctatggcagtggaagtctgggggagttaacagggtctagggaaaaggaaaaatttcctgtagagatcatatttaggctcagacatgaagagtcagtaagaggcagtcagaaaaatgggagtaagggagaaggaaagggcaaaggaaggattgtgtgcataaaaatccagaagtagagatggttgggagagagatggaagagagaggcctgaggaagatcgaggtgagtctggagatggaaacagagattggttgttgactcagtggcataagtccagtgggaatcatgagagggaagagacaggagggaggcaggtcatggaagagtagacttcaaggagtcattggagatttttaaaagaggactggcgtgacttcatttccaccttagaaaactccctctagcagctgggtggagaattgactgatgatgagcaagactggaggcagggatggatagtgatctgggtgaaaaatgatggtggcctaaacccatgtggtgacagtgaggatggatgaactgggtgatttcagatattcacaaggcaaaaatccatgtgacttggggatcacttagtgttaattcaaaaatacctggacagttcaaatgtatagcattatttgactatgggttttacttaactgtagcaaatgctgttggtatcctcccttcccacccctcaccaagcttcctctgcccaagtctgagaccacctgtggacagttggcatacagagataactgcctacatttgtgtcagacagcatcctctggccaccagcatggagcaggccaaaatataagcaagtcaatgccaccaagagtgactctcaaccaagggtaaatggaaattgtgtataaatattccaacttccttgtcctttcatgggacaatgctaaggtgtgttctagatagtctctccgaggctcctcattgagactgagccctttgtgcacatagtgatcacccactcattaaaaaatctctattggatttctgacccctgggtctactgccctgtccccaacttctgcttcctgggatcaacttccagataaatcacttaacaaaaatccttgacttagggtcgactttaaggggaacccaaattgagctttatattgtttttacatttatgagctgaaagagaatgttttaaagacacattttaaagcctttaaatttcatactcacttaactgatgaaattttactctcccacttcttcaacagtataatttagtcttccaccttattagtgttggatgatcagtttttagttttaaaagtgaaaaggtcttaaagtagggttttaaagtgtgtctaaaaattttattctttaaaacctcattgttctgatgttctctgctattattaccaaacataagatccctagaaagctgcctgatttcctgataaaagtaatataaatattatcaagtggtcatttgcaggaagttgatatttaaagcaatacattttattaaaactgaaattatccctcacttcaattacaagtaaccagaaacttcatgtattagaatttcctctcatctttcaatttcactcccattgatgttcatacctaaccatgggaagaaaggggcacagtttagaatgaatactagagagacagatgaggtgaaagaagggaaaaaggaaacaaggccagagaagtcagtattagaggaaaaactggaaagtgcatgtattagcttgccagggatgctgtaacagagtgccgcaggctcggggggcttaaacaacggaaagatattgcctcagtgttctggaggctacaagtctgaaatcagggtgtcagcagagttggttcccacttgaggactgtgagggaagaatctgtttcagaactctttccctggtttgtagatggccatcttctccctgtgtcttcacatcatcttcactctgcatgcatgtgtctgtggccaactttcctcttcttagaagaaagaacagcaatcttattggattacagcccagcataaatacctcattttaactcaattacctataactaaatatagtcacattctcactaggggttagcacttcaacatatgagttgtgggaggacacaattgagcccacaacttaagaaggacgaaatatttctaagggtgtgttctgagcccagtagggtttcctttaaagcttggtgcttttaacaatctcaatgctgatagtgtttcttcagagtgaattaagaacaaaatcctcattgcaaatgttattatgtacagagtaatataattatggaagcaatgaaacatataattaggtcaggtttttttggctttgcaatcttttctggcaaagttttcttttttttttttttaaattaaattttaggttcagggtacatgtgaaccctgttcgggtttgttacataggtgaactcatgtcacaagggtttgttgtacagataatttcatcacgtaggtatgaagcccagtacccaatagttatctttctgctcctctccctcctcccaccctccactctcaagtagaccccagtatctgctgtttccttctttgcgttcatgagttctcatcatttagctcccgcttacaagtgagaacatgagatattttgttttctgttcttgtgtgttattttgctaagtgtaataacctcaagctccattaatgttcccacaaaagacatgatttcattctttttatggctgcatagtattccatggtgtatatgtatcacattttctttatctgtcattgatgggcatttaggttgattccatgtctttgctattgtgaatagtgctggaatgaacatttgcatgcatgtgtctttatgatagaatgatttatattcttctgggcatatgcccagtaatgggattgctgggtcaaacagtcgttctgcttttagctctttgaggaatcaccatactgctttccacaatggttgaactaatttacactcccaccaacagtatataagtgtttccttttttccacaacctcagcagcatctgttattttttgactttttaatagcagccattctgactggtgtgagatggtatctcattgtggttttgatttgcatttctctaataattagccatattcagctttttaatatacacttgttggccatatgtatgtcttcttttgaacagtgtctgttcatgtcctctgcccactttttaatggggttgtttgtttcttcttgtaaatttgagttgcttatagatgctggatattagacctttgtcagatgcatagttttcaaatattttctcccattctgtaggttgcctgtttactccattgatagcttattttgctgtacagaagcttttaagttaaattagacccaacttgtcaatttttgcttttttgaaattgcttttggtgtctttgtcatgaaatctttgctcgttcctatgaccaagatggtattgcttagattgtcttccagggtttttatagtttggtgttttacctgtaagtctttaatctatcttgagttgatttttctatatggtgtaagaaaggggtcctttctgcatatggctagccagttatcccagcaccatttgttcaatagggaagtctttccttgtcgcttgttttttgtcagctttgttgaagatcagatagtgtaagtgtgtggccttattttttggctctttattctgttccattggtctatgtacctgtttttgtactagtaccatgctgttttggttactgtagccctgtagtatagtttgaagttgggtaacatgatgcctccagcttttttatttttgcttaggattgccttgggtattcgggctcttttttgttccatatgaattttaaaatagttttttctggttctgtaaagaatgtctttggtagtttgataggaatagcactgaatctgtaaattgctttggtcagtatggccattttaataatattgattcttcccgtccatgagcatatcatgtttttctatttatttgtatcttttctgatttatttgagcagtgttttataattctcatcatagaaatctttcacctccctggttagctgtattcctaggtattttattatttttgtggcaattgtgaatgggattgcatttctcttttggctctcggcttggctgttgtttgtgtacaggaatgctatcaatttttgtacattgattttgcatcctgaaacttgaagttgtttatcagctgaaggatcttttgggctgaggctaacttttcagaaccagccagatctaaccatccccaacaataatagggatttaacagagcatgacaaaaaaaaaaaaaaaaaaaaccccaaacgtgcctttagggtgtggaagaaggtacatttagaacagaggaagactcacttctctcctcagaactatgaatgggaatgaaatcttcagatactgttttatttttattttagaaaacaaagggttttctagatatagaatcatgttgtctacaaacagagatagtttgacttcctctcttcctatttggattacctttatttctttctcttgcctgatggctctggctaggacttccaattacattgaataggagtggtgagagagggcatccttgtcttgtgctggttttcaaggggaatgtgtccagcttttgcccattcagtataatgttgtctgtgagttggtcatagatggctcttattactttgaggtatgttccttcattacctagtttatttagtagaaaacagataatttgtatagaatcaagttttgaaagcaaatggggttatctggtgatccactggctaatcagaagtctaattaggtatggctcatctttcattacacattgtattaatgaaagtgtcaatttgctgtggcttgttattacctatgaacagtgggttcttcccaagatttccagatcgttcctgcaggaaaggcaacaacggctacacagagtgagagcactttctacacatttggctcaatttcataatcccacaaagggagtggcagttgcgtttctgctgtaacttgtctctaattgtctctgcagccacaagctgcatgccatgccagctcatccatccctctttgggcttttcaagctatctctctcactcagtggaggtaaccatggccataacacaatgtggggcacttctcaagctggcattcaagtcaagtattgagttctaattcagacacacccctgtcgtcccctacagtgcctctgtcagtccagttctctgcgtgactcttccttttcctcatgcatggctgggggcaaacaaaaaaattatgcctactgcaatcatctaaaatgaaatgtttcagccttctgtacctacattttattaataagtattcattcttactgggccttgtcaagagctcttgctgggagaacaattagtttagtatataatcacttttgatgacttcctggatttcacacgaattcaattttaatggaaagcataaccttttatattgggatgtatcagaaagcaaatagtttaccacctgccaaccatctgatctcacttcataatctttatgttaaaggagatcattttataaggtgggaaaagcatccatgaaacataagatgtctatcaggttcccagactcatttcctcattgagcaaagtggtctctaccctattagctcagattaggtggccatatctgcagatcacaaaggacaatgggggtagggtaggcagttggggagaaacaaagaaagaaactaccatttcccagcacccaagtagtgttagatgctagattggattctttgaatgcacatgtcgtctcatttaatcctccacataagtctgtataataagggataccattcccttttacagataagaaatctgaatcctaaagaggtttaagaacttggccaaaatcacatatgtgtgtggaattgaggctgagcctatttagggggaagaaagtcttgcggtttttctactacacccttttgattttaagccatttttactgttccatgtggatattccccaaaggtagaaaagttttcctggatgaactttcagtcagaatatttcctagcatctgggaagaaccccagaggactatatctagaacactagtgttaaacaaccttaccttccctcaatccaatttttgtaacatatcattaaactgtcactgttgctacaaacacccatctagaagcacctctaaaatgaataaaaacaatgatttgtaacaagagaagtgttctggcaagtaaaagggcaggtcataggttttcctcttcccaagacataaccataataacaacagtaaaaataccttattaaaaagttaaaagaactacctacaaccaacattattatataaactttaaaaatggcagctgagccaaggaatgaagaagataattccagtgcagcttagcagaataagtgctgagtgaaagaaagaaatcaacagacgtgagtactatcactaacagtccccaagtgagcccccaacgagtcagcaatgtgggggacggcatagaaatgctctcaacacatgtgcctatcaccacggcaactccaaggaatgggaggaattcctagcacttcacactctccacttgggcatccccaggctgagagaagaaagaaggaagtcaaagtggccagaaccacccagatctaaccatccccaataataatagggatttaacagagcatgaaaaaaaaccccaaaatcatgtttcagggtgtggaagtgggtacactgagaacagaggaaaactcacttctcccctcagaactgtgaatgagaaatgaagtcttctgatactgttttatttttattcttctactggtaggattagaaatggctatgagggaaagacaggtgagtagaaatggcaatgtgaaacaaccaggatgatgtaagtaagggccacactgacttggaggacttatctaaagtaagatgatatctctgccctgtctccccaccacaagaatagaaaacagctccagccaagggcaacgagtcctgatttgttgttaaataccaagtttgtttgtcaaatgtcttgttttgacaagacatttgacaaagtctcagaagaaagagaagttccaggtccttctaaggtcacatattgccccagaagaactccccaaaatctctcccactgctatttttttaaataattagaactcaatatgcacacctcgaagcagctcagaaaatgtagacaaagaagtcactgatagagtaagaaaagagtcaaggagaatcagtccacattattagaacaaatggaaactctgcgtagagttgcatggaagatgaagagtaagagtgtggcattaagagaatatactacagccaaatgagaaagcaagacagaagatagagggaaatgccaaaaattgtttaaaaaacaaaactaacttggaagaaaattctccaacagtactgcatgcaatcatctttctataggtttctacagaaaatgaaatcagtaaaataagaccacaaacaaaagatttttttaaattggatgagaggaaaattgagattgcaaagataaggaaacaagctaaggaccaaaacaacccatcatggaacaaggagtataatagacacagctgaaaacaattacaaatataaggaagacttaatcacagtgaacacagagtgaaaaaaagataaacagcccagaataataagaaaaaaagataataggtgcaaagaacagaagaaaaaactggcccaacataaggcatattattattccagaaatagaaaatgcaataaataggacagaaaaagtattaaaagttatagtagaagagattctccttgaaataaaaaaaattacatactgaaaggacacaaaatgttccaggagaaattaataattgtgagagaattattgaaataataagttattgaactctgaggctaaaaaaaatttattcaggtatttagtagagaaaaaagcaagtcatgagaatgaaaaatagacgctgacttcacaatcttcacagcaaaatttaatgacagaagtcaatgaccaatgtctacaaagttatgagtccaagaaaccctgacccaagactaccttgaaacaaggtgttctacaagtgtagaggaaaaaagaagttattttgaccatgaaacagttaaagaattataacatctgagggcctttattgaaataaactgcctcgattttttggaatctcttagaatgagcctatgaaatatttttatgaaatagtaacatcattgataacaccaataataaactgttaagttcagaaacacaatttatcaacctagattttagtttctcagaatgacttccaagaaatgtgttttgaaggtcgtcatagtcttccattatgtcagcatctgaattagtgatttagctcaaacgcccttcggttcccctaataatttgaaggaagactttgccagtgaatgcatctatttccttgcagagaaatagtatttcagctctactacctcttgttacaaatctcatatgtttactccctgctgcatgaaatcgtgccttttttttagtgatcctggaattggctcttccgacttcttaggaaattttggtgaacgaattcatattaagattttccatatcgtttgagattttacaacctccactcttatcctgtctcagacttacaaaggatgcttcatgagttttctcactccttgtcctgagaccccagttcccccttattcattttaattttccttctctgagtatgttttttgcaataccttatatcgttgaacacatttagctgttaaataaaggaaaacctcccacagggcccattagtatttcattggtggctccagagtgggaaatgagaaaaaacaaaaataaaacattaccaaccatgagctgtcaaatgatatctcaacttcataatcaccttccattagtgaagaaaatacggacaatgtgaccaccactgaaatgggagtaaagaaaagcaccaacagcagcaagtcactgtaccccgaatccggtgggtagaagcttgcaatagagtctgataactgggttggaactccttgggtatggggggatgagtggagagaaatgaataagtgaatggatgaagcactggggttattaaaggattagcaaagccaatgcccaatcagagcaaccttaaaaagtaaaaaaggaggatttataatctgatcatgagatggttccaaatttgaccgctcagtgaaacaggataaggtatgacgccatcatcaatatatatgactctaactcttaatatgctgtggatcctcccaactccgatattttcttctgagtctttgattctgtaaccctccctgttcctcgaaaacggggtgtctgagaaaatgttctgccaggagcttcagctgtctcccttagccatgttcatcattcagccagttgctagcagtcatcatcatttaaaagacctcaagctgctctctgctgggcattggttcccaccaagaagcaggaggatgagagctgtatctgagagagtggactatttttgttgtcagtctttctgaagtctgacacaatgttccttacagtcactcttcttctggacctgaactttctgaacttcataaggcagtcaatcttccaaaattatcgttacctgtttcctatgctgctctgagcaagaagagttgactttgttctttgcatgtacctctagcatctcagcttcgcctgttgaccctgtctcctattattatttgattctagaagcttcattatgacttttcctaattgatataaccaggcaggttacaaatggaggcctgtagccctctactgtcttctttggcatcttatgaatgtcaccattttcacagactttttcttcctaagttcatttcctactgagtctgccaacactgatgaaccaaaggaggtataaaaagtgttctcatatgatgtttactaagttttctaagtaacagcagcaagttgcatactgcatttggaaccaaaagacctagatcctagtactgtttgccactgctaagtagttgtatcaccttaggtatacaggtagagcctgagtataaccaaatagtcttcagctttcatatctgttgaatgcagacaagagtactgaagccatgctctcatgggacagtgaagaagtaaagcaagacaatgaatgcagagtgcttcagtatccgaaaattcctcaggaaataaaacatttatgttgtggtagcagactgaagaacaacttgttagtaactctattctccccctttctgcctttagactcttttatattaaagaaaggaagttgggagggaaataggtagagggcaaggccttgtgactttactttgagtaacaagaattttattcatttaacgttaattgagcacctattgtgtcttaatctgtttgggctgctataacaaactaccacagactgggtggcttataaacagcagaaatttatttctcatagttatggaggctggaatgccataaatcaaagcatcagcagatttggtgtctggagacagaacccatttcctagttcatagatggctgtcttcttgctatgtccttacatggtagaagaggtgaggaagatctctggggtctctcctataagggcactaatttcattcataagggcccttccttcatgacctcatcatctctcaaaggccccaccaccaaatatcatcaaattaggggttagggtttcaacaaataaattttggtgggacataaacatttagtctatagtatattgtgtatgtatttctatgtgcagtagattcatatctgatttttactttgatcctctcaaaaaatggaatatttaatgagagatgcagatgagaaaacagttaagtataacagagtatgataagcatcatgatcaaaatatgaataggatattactggaagcacagacctaacctgaaaggtagactgaaagaaggcttcttagaggggttaaccctgaggcaagtcttctttaccagcaacaaccccagtgtacatctactttcccagtgtaattattaatacagccccctatgactatcaagaatgtcatggtttgaatggtaatatggtcttgggtatatacttttccttgtcctctacagagagaagatggggtagtgtgataattctagaactcttttgatagttatggattttatttatgaaatgaaataaagttctattgactacctattctgttgatcctataaaaagtacctacaataggaccagataatacatgcatcctccactctttcattcccacagcaggcatcattaattgattgtggcagtcccttactgagccaactcgaacacaacctcaccatttttctcaacatactgctctaggcagccactaccaattgtatcaaggtgaaatctctttgtcctcccaaccttacagtgtaaataaagcatggctccttctcacctagctgggaagatcaagttgcaatatatataattctaaagtaaatctgcctgtgataagtagtgcaaacaatagatatgataggagttcttattagaaaattttcattttccaagcctcccatagaataatagctttatttcccttaagaaaaacacaagaacttgccaattggatacatcgtctagtgtttcatagtatctttttttagaatttgagattgaaaaatgtcaccttagtgatgacagaataattgagtttaaagatttgactagtcaataagaatattcggaagacatgtgcaaagagcactgaagatttgcaaaaagacacaaaagaagtaaaataaaaagaaaaatgacaataagctcatgcatttttaccttcaaccttctggtcccccattagctgacagacacgcaacatctgagctgactgaaggctgatgtcagcctctcattcctggctttgaccaggtgtcgtcttgcagtacacaaaaaagcgtgagtctacacagcagccctgcaaaggaatctatagcacagttgcagaatgaaaagaagaatgtaattgaccctcttttataaaaggattataagtttatctacaaaattattttacccctgacctgtcatatctgcgttgctcatttagattgcatctaatgtagcaacatgggatagtttactgtgttggggctcagaatatgatacacaaaaatatggcaccttgacatactgagaaagtctctctgaccttctcctgccctcctgtctcccacccctctttcttccccaaaatgagccatagaaaccagaattcctcttccacaagatgggtaatagaaattagaagacctcttccccaaagcaacccatacataaaacctagaagggtcattctctaccttctgccttgaagaaccttattccagagagatcctgcctcatggcggggaggctgggggagggggtaaaatgctacagagaaaggccaagaagaatctgaagagacaggtcttgctgtgtttccctcttcagtctgttaccattagatcatgtccctttgtccaatcacatgtttccatggctccccattcttcactgaacctgagcataaacatagacagtcttccctgggtctttgagtgttcattgctgaagggtcccatgtcatataaaacttagagtaaataaatttgttatgctcttcttttgtcaacatgccttttgttataggagtgttggctgtgatggatgagggaaagtatcacacctttctccccctacagcggtcaagaagcacacatcaaggctttgagactctctttcagacttgtggcttatacaaaatagctctctcaagtgtgaagtgataagtatggaaaaggtgtcagcatttgttaattgccttacccaagtattctaccctacacacacacacacacacacacacacacacacacagcagctgcctctgggggaccttctgggaattatgtgtccacaaattttcaaacagaactgccagagcctctatcctttccttggaaagttcagcacccacactgctcctctcctcagtgtcccttgcaaatgtttctgagggttgttacagagtttaacctgtcccatggtaatctcattttatgatcaagtttccagcttctactgagtcctcaatctccactttgccgcttcccctgtaactggagttcttcctgcacatcattagccctttgggaattcactcttattcttcccacaaagcacagtgtctgtgtaaccaaacattacttggggttcaaagcaacaggatggggaccacaataatttaagaaaccctcttaatgttggaaagtaagatgtttttgctctgaagtgcattcttctctctcacagtctcttgttggctgtgttccctggttaggcactggctccctgccagcttaggggcctctagttagttctctgtagcatcctctcacctgtctctcttcttctagctcccttgcctctcacatacccaatcacttcctaggcagtccttagaaattcagaatgtccttcaatgtatcaggtttattatgcagaagaaccctgctgtttcctatctaccatcctcacttttgagatggtgccctgggagaaagggagctcaatttttaccctcaaagagagcatcaagatagagtcctaattctccacctcctttgatgtaaaataaaatcctccttagcctgcaaaagtggctacattcaattttctgcattttaaaatggtaatttttcttcctgttgtgctaaaagaaaaacagagagaaatttgtttcactattcatataacatacttccattctctacacattgtgattcagggaattatcagaaagagaagcattaaaaaaattctacagtttaatggagcagtactacacatacctgaaaatagctgcatgtttcttatgctgcaaatatgcatttctgagtaggaatttttttaacctctttatcaatgttactgtttttctctgttctcttgcaatttaaaaaaaaactgagtctcaattataccagtatctaaagaaaacagagtatgaaaaattggcacacagagctgtaatttggaaccgggtgttgtccttagattgctgtaggtgtgttgggggaggtgtgtttggctttgcatcatgatctgaagctagagcaagaaaaggataaaattaggacatgtttcttcctctgtaaaatggaggatttccagattccaccacctaatctgtatcccacccctttcctgtttcaccatcagccccgtcttcatccttactccccaagcccagcaaaacagaataagccctgtgtagaatttccagaaacattgcagcctacttctggggaatagtcttaacaaatctaactgagagaggcctaacaatacaggtgaaaacagacagggttctagttgacttgaactgtagtgtcaggtcactgggaatagggacaatattttgaagactttttgaaactcaggatttctgacttgtggtgtgtcactatgggaacaatgaagaatagaatcgactcggggctcaaggactgtttttttcctgtcttctctactcattagacaagtaatagatcttagctagcctgtacccacttgctacttgccaagttctgtgctgttttgcttgtattatatcatccatcctttataatgaacccatgagatagctactgttaggtactattattatctctattagcttgaagacaattgcatacatatccaagtgactttgaaacactctaaacctaaatagtagttttggatggagggagttgtccagggaaaattcaccaagggaagcctgaagtgggaaggaagacatggagaagaattatcatttagtgagtacctacttcatctcaggcaactgttaaatgttttctccctttattctacaagatcccaaatggttattattatcaacattttataggtggagaaactgccgaggtcttaaccatgttggctgtgaaaactagtttgtatgtccaactcaaatgtccatcagtgatagactggattaagaaaatgaggcacatatacaccatggaacactatgaagccataaaaaaggatgagttcatgtcctttgtagggacatggatgaaactagaaaccatcattctcagcaaactatcgcaggaacaaaaaaccaaacaccacatgttctcacttataggtgggaattgaacaatgagaacacttggaaacagaaggggaacatcagacactggggcctgtcatggggtgggtggaggggggaaggatagcattaggagatatacctaatgtaaatgatgagttaatgggtgcagcacaccaacatggcccatgtatacacatgtaacaaacctgcacattatgcacatgtaccctagaacttaaagtataataaaaaaaaaaaagaaagaaaactagtttgtgggtttgaatcaaagtctgtctgattccattgtaccaaacgtctggaaattgagctgaagagcagccataattcaacatctagtgttcccaggtcctattttagacaagacccaatatttgcctgctgaaaagtctaattttagaactacttctagatatacatacttggtttaaactatacagatctaaactgataaatatcccagtcagggccttatacacataataccttgattccaatttcctggaccaccagcgagctggctgagtctattctgcttctctgactcctgcctctattggaataaatggaacatcataaaaactcagtgatgggacctcactcttctcaaccatcctcataagataatagcataaagttacagaggtgggatcagagctaagggatcagaaagtctgcacaaagatgacagcagagccttgccatctgaagtcctatccctgatttctactcccagatgaccctttctgtggggttgtcctggttctcctctccctttggacttaccagtcatcattaactcctaagtcaacatttagacaccagcttgtaaggtaccaaaactgctttcccaggtggtgttataaatagctgtgggagaaacaaccagctttttttctttttcactacatggttgaaaaaaaagcatagctctgagatttgggggaagggatgtctgtgtatatgtgcatatatgtatacaattgtatgcatatctatgtgtatgcatgcctgtggatatgtatcttggtcccttgaatttctgctctgttttgaacagatctcaggattcacttagcagatggtctgccaagagcctgatagagcctaacttcccacattaaatgtttatggagctgctgatcaggggtgggggcaggggtaagatggacaactcacaaaccccagaaaataatcaagccctttttacttgaaatatcaaatatttttttgtagtgctttatagtttacaaaatgttttcacattcaccaacacattttctcaataaccttttgatgtatgcatttatttcaattttatacataagacaaatgaggctcagggtggagaaaagatggctcaagctcatatagttcctatgtataaaagagagggcctctcacctaacaaactgtctcacttaaagttttaccatcccaccacattgcttactactgtctttccaaggggcacaatgagactaatgaaagggacgtacagttatcctcagtaggactcttccccttccaaagctttcaatacatacttctaaaaaataggaataagatggcattcttcacatgcagaaacattttttcctttgctctcaaaccaattttttaatacaaaggacacctataatagaataaatttatagaagcagaacagtacaaaatataacaggcccatttgccaaaggttttaggaatgcatttctccccagtcaggatacagcaggaagttaaatgtttgtggatgaaaaactcttaagacaacacttctaccaatgcatgaaactttacactgatgcttacatgcatgtgagtggtgaggattagataacaaactgtggatgtgtagtgtgttttattagtctcaatgaatgctaatgaagcctaatgaagtaataaactgagacagagcatctggtgagaaagacctggtggatatggtcctcggagggtagtggagaaggagtcaagtgtagagaaagggctgagaaaagaattggacttcactccttccgtcagttctttctctgtatcattagatgtagggaggcaggtgttcccactgtgtcattaagccatgtccaggatacagctgtattagtgcccatgaaaacatgtgctctctccaaggaataatgagcaagtaattgccgttttgaggacttcaacacatttttaaggaaggtatatgagataacacagaggatcacgtggtaaaatcagactaacatgaatcagaggtcttactcagtatcagtcaagcttaactaatgatatcaaagatgtacataatcatgaagcacaggcaaagcaaggaaaggcctggtaccttcaatgctgccctcaaagtcttttcttgccacatcaggctaacactcaaggctcagatttacctatgagtctctaagcaatgtgcacaatttacatcacttatagaacaagtcatctatgcttagatagtgacaagcttacctaccactttccagggagccaagatccataaatctgtggatccaggtttatgatgagaattctagaatcctgctaaaagctttctattgacaaggactgagcttattttccaagaagtccacacttagcatattaaccaggatatttgactgggtctcttgtcttctttcttttctggagcattgcaccaataaagagaaagattgggtgcaagcctcctcctgctaattcttcccttcctggcatatgactgcatgtaagatgtctgtgaatggcacttttagttgactttgacttagttctggtgatttggaaccctaaagcatttcccagtttctctccagattttagccagtgttagagttggaggtggaagattagcttggagaacggatgattcattatttcgatggttcttttcactcagtaaccatttttatttgtgtaatactttctctctacaaagagtttccaatagaattatacaaactaatgcaaaacaatcccagaatcaggtaaggtagatatgatatgaatggggaaacaggatcagtttcagctaacaagcagtgaaactagaattcaagcccaggtctgtttggtccccaaggtccatgatctgttcactgcatgatattacatgtgctttaaagagtagacaggttttgaccagggtagagtgaaaagtatgtttccatgtttcttaaactgaatttcttaaactcagagttgttttccccaagctctgcttgcacaaaacttttctaacttgttatgaacatagtaaatgctaagtgtgctatgacggaagactgctctggcatcataaatcacttttttaagaacacccacgtggacaaaagatggatgggctctccccacagccctcatctgcttccttcctgacaggtatgatgttagtaaggggagtttgatgcactttccttctcaggcctctcatttcttcctcctcaataggaggttgatgattggcttctgaaaaatagatgagaaaagggaaagtaaaagggatgaatgaaaaattgtcataatttagtctatacattcaaaatataggatgctgtgctgataccaaacagggacaaaaccataaattgcattatctgtgctgtcttcctggtctagtgtcaggcctgccttgtcccaatccaagtacaactgcttcaccccacagcagggcccttttggttccccagttgccagcttgtcctagggccaaaccagttctgaactgggagattatctagagctctcacccattatctatgagagctcttacccatcattccattacccaactttgttacctgggttttaaagcagctctggccatgaactctgttatagaactcatcttttccttttttaatatatatgtaatttcaacttttattttagattcaggaagtacatgtgcaggttcgttacatgggtatactgtgggatgctgaggtttgaggtacgattgttcacatcacccaggtagtgaacatactacccaacagtttttcaacccttgcccccctctttcccttcctgctttagtggtccccagtatctattgttgccatctttatgtctatgagtacccagtgtttacctcccacttgtaagtcagaacctgaagtatttggttttccatttctgcactaatttgcttagaatgatggcctccagttatatccatgttgctgcaaagaacatgatctcattcttttttatggctgtgtagtacttcatgatgtatatgtaccatattttctttattcaatccaccataaatgggcacctaggttgattccctgatgtttttattatgatagtactgcaatgaacatataaatgcatgtgtctttttggtagaacaatctattttcctttgggtatacacccagtaataggacttctgggttgaatggcagttctatttttagttttttgagaaatctccagtggctttccacaagggctaagcaaatttgcattcccaccaatagtgtatgagcatccccttttctctataacctcatcaattattttttgacctttaataatagccattctgactgttgtgaggtggtgtctcatttgatttgcatctctctgatgcaaatgttgagcacgttttcatatgtttgttggccgcttacacatcttattttcagaactcatcttttctaaatgaagtggcaacctcatgccctgatctgtgtaactggccttctcctccttagcctgcctaggattccaatctctgtaaatttttcaactaccttattatttccatgtagaaaggaactagagctgtggtcctatattcacaatgtctagacacataaaatcttatgaaagacttccctaaaattacaatcaccttggtaagatcacaacagtcatctgttttcacactgtgttatgcctacctgttaggatatctccattatttctgggtgaaacccaccactcagaccacccagtattattatatttgtgtttgttgccatattatttggacacaacattatatattcaagctgcaccttttctagcttccagaattagttctgttccccaaacttctagagtatctcagtaaacagataatcacagctgtggtcccatttcagtcaaacttacttcactgtcctcagcctgacagtgtaaaatcacccagcatagaaaagcatcctttgccattaaagaagtctttgccaatcttcagggagctgagaaatcttacttcatgaatttcatattctcttctcctcttaaaagatttatttgaattaattttcaaattaaattatatgtaactgcctctgaaaaaaatctcatgacacccctgaatataactgaagtcatctgtaggtatcaccaaactgaagttgggactgtcttcatgaggtcaattttaagtcagggtcaaaatgctgtgtagataagaaagtctgagtaacctttcccttcccagatcccaatcagcagatccaagtcatatcatatccccaagtacattctgacttctttataaaccagaaggagaagagaaaaatcagcatgtcatcaagtcaagagttttgagggggtgagagcgaagaacaggaatcattgataatgtctcttggcagcaattcaaagtcacatcagagaacacagaaagtaatgatggctttctggacacctgattcactctcttcaaacttctcaggctaataattcagaaaggggtaataaacgttcaaatttagcaagaagctcttcttaatcttcaatagataattcagtaactatttcaataatagaaaatttgttaaataatatacaatattggagagtgtacagtttgccagttacttgcatacatcactgatggggtgcattttggtactttcggcctgaaaaacaaaaacttttgtagtaggaaccaaaagctttaaaaagttaaaagccctaaacccagtattttaactaaaaagtctatctaaaagaacaatcagaggtgcaaagattattcatgagacaatacttataataaagaaaaaattgaaatcaataaaaatggttaaataaaggcacacccaaataatggaatgtatttagccactaaaattatattctaaacttatttaatgatgtggaaaagttttcaagatataatgttagtgggaaaagcctgacagaaatgctgtatatatgtgtttataaagtctcattttgtatacaagattatatctgtaaagttagattacaaaccatgtgaaattctgttttagacttttctgtagtttctgaatatagagaatgactcagacactggccaagccaagggatatactccctgctctgtgactgtcttatcttttcagcagagaactctttccacatgaactgtcctctaaagtgcttatgctacctccacaagagctcagattgcaccgtgcaactagctgttaagaaatgaaggcaaatctaattatcctggtaatttctcagccactagcacagtgtgaaaatggggccttcctgttcatacccttggcctcacatctggccacagtatacaatgcttagttttgaaaaaagaaaggctgaagaatttcatggatgcaaaagagatttgttgttaatctgggttccaggcacatggtaggtatttaataaatgtgtgataaacaaaagaattaatgactgaaccaagcaatcaatcagtttatcagaatgatggcattcctgccattcacctaagttatttggggcatcaagataaacctcttatttgccagtcttatcttctgtatcctgttgaggtctccagtgaccggggggaattcactagctatcaagaaccccaggattcttacttcatttaaattctgtcctctcacttctatctcagtgcattcaagaaagggactcaatgtacaggctgccctattcagtagctacttgccccaccactacttgcagatgttaaaaatatacctcaagaggatatgtgagttctcccttcctcttgtaaggaactatgaatggtccagatgctgccaaggggacttcaggcagcatgatgaaccacaggggtgttaggaaaattctgaagacaaaattttaacactagagagtccagctacaaagttcttgctctgaagaccaggagtgaggtcaagttcattgttacagaaccgagatatcagagtatgaagatccagaactaaagaaaattaagaacaagcaaatggtaaggggtaagggtggggagaaattccacagtgatggctacaaccactgggaattgttttgttgttaaaatattttgttgaactggcctggcattaagggaaaggagcagagtagacaattaacatgtaggggcttggagagggttgatcaggtattaataaccctctgctttgggccctgtaatggttaatattgagtgtcaacttaattggattgaaggatgccaagtattgttcctgggtgtgtctgtgagagtttgcccaaggagattaacatttgagtcagtggagtgggagaggcagacccaccctcaatctgggtgggcaccatctaatcagctgccaacatggctagaataaagcaggcagaaagagttggaaagagcagacttgctaagtcttcccgccttcatctttctcccatgctggatgctttctgccctccaacatcagactccaagttcttcagcttttggactctgggacttaaacaccagtggtttgccaggggtcctcaggcctttgaccacagacggaaggctgcagtgtcagcttccctacttttgagattttgggacttggactgacccacaactggcttccttcctccttaacttgcagatggcctactgtgggactttaccttgtgaccatgtgagtcaattctccttaataaactccctttcatatatacatctatcctattagttctgtccgtctagagaaccctgactaatacaggcctgaatacagtgtgtagcttcacagaattaggaaccccaccatcactcattctcactggcctggcaaagcctggaatttaggagcaagctgtgggaaagtatgcagatagaagccccaggacaaatctttttttttgagatggagtctcgctctgtctccacgctggagtgcagtggcgcaatctcggctcactgcaagctccgcctcccgagttcacgccattctcctgcctcagcctcctgagtagctgggactacaggtgcccgccaccatgcctggctaattttttgtatttttagtagagacggggtttcaccgtgttagccaggatggtctcgatctcctgaactcgtgatctgcctgcctaggcctcccaaagtgctgggatttcaggcgtgagccaccgcgcccggccgacaaatcttaagtttatcctttatatccatgtagtctataagcacagtgtcttgctgtcagtcaacaatcaggagaggcttgctggggattgtgtatttgtttgtttgtaatattataatgttaactacaaccccagagtacaacaacccaacaatctaaatgtttcttttttttttttgacacagagtctcactctgttgcctaagctggagtgcagtggtgcaattttgtggtgaagagttgcccactacaacctctgcctcccaggttcaaaccatggtcctgcctcagcctcccaagtaattgggattacaggcataggccaccatgccctgttaatttttgtatttttagtagagatggggttccaccatgttggccaggctggtctccaactcctgagctcaagtgatccgcctgcctcagcctcccaaagtgctgggattacagatgtaagccaccgtgcctggcctttttatttttattttttttagaaactggatcttgcgttgtcacctaggctatatgcagtggcatcatcatagttcactgtagcctgtctcagcctcccaatatctcatctttgaatcagcacatgtctggtagggatacacttaactcagaaatgcagaattaataggacctcagtcagccatggagacacaatactctctctccccaagcgtctcatgagccacatagcctctctctgtctctttctctctttctctcccctctcccaacccccaactacctctatatctcccttctctctccctcccttcctcccaagtttctctctaggatttactgtcttcctcttgcttgactaaccaattttcctgcatcaagagtgtccacatccttgtaactctgaagtgccatcacgtcctcttcaggaactctccaattctgctccttttgctaagttggttttctctctttctctctctctttctctccctgcctctctctccctctcccttcctctctctctctccctctctcttctgacatccacagcaaggatctgttgtgtccagctcatctttggggcctaggggcctaggccatggcataactctctggcaagtctatggattaactgaaaacggagcaaactaatacctaccttgtaggatgattgtaaggatgaaacaaggtgaaaatgtgtaaatgtaacctaccatatgttgggcatatagatacttgaaaagttgctttctcttccttttttctctttttatagtcggccaaactaaattttaagtcttcagatcttcctcaggaaatgatttctagtccctagctatttagtgatgtttataattgctgatctcatccacattcctttctaggtgaaattgcccatctaaaatcccatgaaatccccctccccattttcatagctgttcagaccatgacaagtacctgttccttttacggatgaggaaatttaggcacagtgaggttaagggaattttcccacacaatcagtaagtggcagagttcagatccaactaagccaaaatctttgctattttaattgtaccatgaataactgtcttgaacaatgatcaaatataatattacagagaaagagaagttttatttatcctggcacaaaagaaacaaactaaaataatcaaaatctctcgttaatagatgtttaaaatttgtacccagggattgcttctaacaggatgctgcagatcaagggaaatcctccaggagagagttgttgcctgaggcccatgaagaaaaagcacaaaatcttgtgataacagaaataggtccaaactgatggtttgagttgttaagtcgtatctagtttaccttctggaattccaacatttaacaagcgtgttttggggggcagagtggtttagagaagggatgaaacaacttacaagaaaattgtttgacttaaaaggttcaaatgtactattctacttatattttgaaggcaaataaagcttgattgagcaactaagttaatcattgactcgcacttgttccattaaattgatatgccataggtaagtataaacttagtttcttcctttttcaaggttgtttcctaactgggcagaacaatgacacattagttttggattatctgtaatctagtctaatttttgtaattattattatttgagattatcttaatctagtaatctgatcattgtggctggagaaagccagtcactctagcacaacagatctttagatatgtccagaaaaagaatgctcaatgtgccggtggcccttgaattgcacccattggtccaagttcctggagcttaagcaaagacgatgcaaataatatccactgaccatttgccactgctgcctgagggaccagactgtgatgaaatagttgaatttacaagacaaacgcttcatgaagacaagaaatgactcatcattgagaagaaaaggaggcggatgtagcatatgcctaacatatctaagtgactctctggagaagggctcattgccagcaaataggacattaccctcaccaagcgatttaagagaaaatcctaggcattccattattttcaccagttaaagtttatccaatatttgactgaatgaataagaagctatgcattgttatcacattgaagcagtgatgtaaatgacaagaaagctgtaaacagatataagaaaagaatgaagtttgtggctgggtaggggatgaacattcattgagatctgggcattacataccacatgaaatgctttacaatataaggtttttcaacctcagcactattgacatttgaggccagataattttttgctgtggggagctgtgctgtacactgcaggatgcattgcaagatccttggcctgaattcaatagctgtcagtagcactgttccccaattgaaacaaccaaaaatatctcaagacgttgctaaatgttccttgagtaggaaaatctccattggttgaaactgtgactttacaataatagtaatagctaatattactaattaaccattaactattaaaccattaacctttattaaaggtttactagatatcaagtgttgatttaaaccctttcttttatgtttaccttttttatgatcaactctatcactcataaaaaatagtgcagaaaacaaaatgtatagctgaatgatttatcaagcagggaacatctatgtaaccaccaaccaggttagggggataaaaggacattgccatctttagaagatgccatctttagaagcttccattgtaccccccaccaaatctcaaaaaactatctgccccacaaggtaaccactgtcctaaacttccttgtcttactttatagtttaactacttaaacatgtatctctaaagctatagtttacctgtcatgcaaccattctcaggcatttacaggtggatgtgttccattaaaacaaaaagtaaaccaaaaagaaaacgacttgcagtttaggaaacagaggagacaacacaagaatcctcaaggtgatgaggaggatcatttcagaatagcagctggcacctaacacaaaaggacctggcacccaccagcccacaatggagcaagtaagacagactcaggatagatttcttcaaggaaatgtcatcagtataagtgcctgatgcatctgaatgtaccaagaggtgatttggacagctggtggaactttttggcttcacttagagaaaggtgcataggaaattaaacaaataaaggataatttcactatgaaaaacaaaaaacagtgcaaaaaagttatcctagtacactatgtgactcaatcataaattatttacattgtcatagtgtaaacactgagtattgctctaactgatataactatattcatgtacaggataagggaaagtgtggtgataagatggagaggtatatgaaaattgagggaattaaatcctcccaagttatgaagccaatagataatgcctaacagaagcatgttttttagagatatgatggtaaatatctaaagtattcacttagaaagatgaaaatggttgcctcttaggaggaagaaatgggagtaaaatgaagcctactgtttttcatatcaaactttgtaacactacttgactcttaagtcatgtgcatgcaaatttttaacgaaaatgaatactttaaaattcactttacaagaggtaattatgatacaggtaaatccataagtagtgcttgaagcaaaataaatagaaaatagatagtgtatgcataaacccaggtttaacatacttttcctgaatgatcatttgcaaataggtagtgcagttgtttggggttctccagaaataaaaatgaaatggcagtaaactcacctcatcccattcaagcaaaaatgttaagggatgtgtctgtaagatacaaggcaccacagtgcaactggccctttgtatccacaaggccaaccaaccacagatcagaaattctcaataaataaaaaaaaacaacaataaaaataatacacaattttaaaaatacagtatgataatcatttacatagcatttaccttgcatcaggtattgtaagtaatcaagatactgaaagcatatgggaggatgtgcataggccatatgcaaatacagcatcattttatacaagggacttgaacatctgtagattttggtaccctggaggtcctggaaccaatctcctatgcataccgagggatgactttacagggaaatttaaatgctcaggaagaaagctcttcttcccagtgaaataagtattcactcaccttctatattttaacataattcttgctttctagatcacgcattataagaagagttatcaagaatatcctactatttcaattatttcagcctggagaatacctggcacctcaaacttccaaatcctttgtcttcccaaggaggtatctgaggtgctcagtgaccactgaaagtttcctagggaggacacagatgctgtggagtgagcacagacatgtgtgtcatgtctattttggttcaaatcccagttctattcttaataggtgtctcatcttggtgaaattatttaatctctcttaatcacagctttgacatctaaaaatacaaggataataatgcctacattgctcgatgtttctcaaaatcaaatagatagtttttataaagttcttggcacatagatggttctctagcaaatttagctaatgttataattattgtcatcattataattataattattattattactaccgctgttgccaatggtattacatccaacccactgcacagtgcctttataaaacagctcctgcttcatttttctccgcttctatggattccaatcttgctgaggccactgggtcttggctgatttttggttttggtttttgatttttttgagacagggtcttactctgtcacccatgccagggtgcagtggcacaatcaagactcattgcagccttgactgcctgggctaaagcaatcctcccacctcagcctcctaagtagacacatgagcacacaccaccatcctcagctaagttttttattttttatttttggtagaggcaggggtctcactatgttgcccctctcactttgagagactgaggctggaggatcgcttgaggctggtctcaaactccttgaaagaagatgatttcagggagaattaagggactttatatataggccaagaattttggagccccaaatgtaaggagtgggattttctacaagttgggcagagaatcacaatccttatattaaaaaacaacagcaacaacaacaacaaaacacaatcagctgtgtgacagggagagacatgaggaaaggcagaggggtaatattgggaactagaagatattctgccagaggaccttcaaaggggctaattctttttgtttcttccttggtcattgcaaaaagtcaagtttagcctacagcttaacattttcccttcaactcttcagtaaagtgtaacacctacacacaaccatgaatggtgtatgttaaggatagtgtcatttggggtgggcatcaaagggtttcttacttgttccacatccactcttctgatggacccatagtgagggagccttgtcccatcaaacagactgtgccatggaattctacaagtgaccaacagcaaagcaagagaggagccacaccaatttgtcatgatgcagtgttgaatgggcagtgagtatgtggtggaatccacacttgaaaacagtgcacattcaacagtgcacataaccacaagcagctctgtgggttgctggcaaatgggatgctgctgttatggcaccatctctattataaatgtgttcttagctaacctttaaaaaacaatttcccttagaaatataagtaattcctatttgaacctctaaaatgcatttcgttctagctagagctatgtatcaaccttcagccagcttgaaatattgtgagcaactttagacctcttaatcaaggaaacaatttgaatacactaagggagcagttaagggagaggccaagagaatgaaaataagggtcacagtgatgtgctgggaaagattaaaaacaaccaaccttaaactgttggaaataaccctcagaatttttagaaaatatataaagctgtttagaatggaatacctagccattccctttcctatgaagttttcagttttccacttgtaattacagcaatctataaattatattatatatttctctgtcttaggtcccatgaataaagacaatccccaatccatattacattttccaagcatctatgagatgttgagagtccttgaaaaaaatattgaatgataatcttttagcttattcaaatgatgagctgcctaggctaggacatatcctgaaaacactatattattaaaaaaaaatgttttaaatctagttctgagaaataacctaaatcaaatttgtagtcaataggctcatgagaacagtctccttgaatgatgaaatttgagaacttgtgtgtgggagtaaggcaaactcagtttcactactggattttggatttctatcctcctgcagaaaactttcagtggcactatgattgcccattttgaaccatccttcgtcacctgccagaaacagccttggagactgtggatgggcttgatgcctggcttattcattcatgatggtgacttagtaccaggatgtctctcccacagagttttaataagaaaaaatgttgtccctccacttacagataacaaaaatagataagcaaattgagcacagtgtttggtgtgttgtagacatgcaagggcgaacagaatggaaggaaggaaggaaggaaggaaggaaggaaggaaggaaggaaggaaggaaggaaggaaggaaggggaagggaagggaagggaagggaagggaagcgggagggaagggaagggggagggagggagggggggttgatcactatacttttctagtccatttatttcattttcccattctttcaaaagactttcttacaccttctctcctcaaacctccaaaatccctcccacattcttactctcatgttttttgtggagaaattttaaataatacaaaagaagtttggtggactctactgtctcttccacccacctactatcttcaaggccacatattccatttttgcacctgctaacacatgaattaaccatactcctatctaaagacagtctttttgtacttgatcatctcctctggtccactgaaggatatctttctagcaattgtttcttctctcaccctctactaaatcatccccatcagcttacaaacatgttgtttctcccatctaagaaaaaaacaaaaaaacaaaaaacaaaaacctctctagaagttttcacttttcctctagttgccattccatttctttcatttctttgcagcaaaccccttttaaggtattacatatatacacacaatctacaattttttctcccattctcacagaaatacaacccaacttagctttctccaccactgttccaatactgctcttaagaagatctactgtgtatagctaaatcaaatttttcagtttccagtccacaccttccttggtcaatcagcagatcttaacacagttcctcactccctccttaattgcactgtcttcacttgggtttcaggacaccacattctgctggcttttctcctacctctgtgagagtgtcttcttagtgtaccttcttctggtttctcctttttttgacctcataatgttgaggtgcccagagctgagtccttggtcatgtcttctttatttacagacattattcagacaaaatttttagtcttacagatttaaatatcatatatacaatggctactttcaaatgtatatcttcagcccaaattttctcctaaatttcagacttcaacaaccagccacctatttatccccacctgagtatccaacaggcatcttaaattcagcatgtccaaagttaaactgattttccttcttaaaccttctgcatccaagacttaaccatctcagttgatctctccatcttttctatcattcaagccaaacactcaggagttctccatgatttttctctttctctcctatcacaaaatctataagcaaacaatgctggctttacctgaaaaacatacctggaatgtttttccatttctttgtctgagctctgaacaaagaaccataactgggctccctgcttcctcccttgccctcttacagtgtatgctcaaatggcacacaggatttttctttgtaaatgtaaatcaaatcttactatccctagctcaaaatcctccaatgattttctaccttaatcagaataaaagcccaaattcctttacaattatttagaaagtaattaccaacttgctacttctcttatctcatttcctactttccactcttcatttgctccactccattctctctaacctgtttgtcattcctcaagcacactagacatactcccacctcaggacctttgcaccagctgttctctctacctagactattcttcctccagacacccacacagcagactctcattgccttcaagcctttgctcaaatatcaccttttcaataaatcctgccctgaccaccatatttaaaactgcattttccccttccttcacccacagggatcccactctgaattcttttccatagtacttatcacattctatcacattgtgtaacttatctgtcatgtatgttggttagtgtctgtctcctaataggatccatgaagacaggaatctttcactatttgattcactgacatgtcttaattgcctagaagaatactggaacatagtagatatttaataaatatatgcagaaggaagggaaggaaagacaggaggaagagagaggaggaaggaaagacaggaggaagagagaggagggaggaaactggagagtggggcattttggctattctcagaccattcagttgccctcctttggcctcagtgttcatcttgaaatgaaagtgttgaagcagataaactcaaagatcccttccacttctacatgcaatgattctataaactccaaaggggttcatagaagatgtaaagagcatttggacctcattatgatgcaaaaactcaggacaagtaggaggcctggtagactactgccagcctctttcccttttattcccagcctgccatgaggctttcctggatgagtcacttcagccctcctccagatgacactgatactggaaaagctggagcgtctatcccacgccaccccctgaagtacaggctacacaaccaaaggcttctccatgagatcccacaacatatgtctctgccaaatttaactagaacctgtcacttcatatcctctggttagattatgaaagccacccttctgcctttgatcctattctactgttcccctttggtttgtgatatcatgacaaagcccttgctctgctccatggaattgtcaagactggcagaccataagctgctctgatagcctgcattggcaaagggccctacaaatctctctgttcttgggtacagagtccctggtatagaagcttatgcacctgcttttccccatcaggacaaatgctatttcccaagagaaggataaatgctgaactgtaggaaacatgggatcttagccctgtgggacacttgcagatgcagaaagataatatcaacatccgctgactgattccattgctgctgcagaggcaaatggagaattggcagggagggcccaaaccatagagaagtcaggaaaatatcgtatcatggtgtgatgtgcagatatgtcagggaggtttcttagctgccacccagggaacaaaatctttctgtaacagtatggccaaagcctaggtcttgcttcctttctcagacctgaacctccactgctctatcacagaccaagttacagaagtcatttggtttagtgagtcaagacaaagcatcaaaaactaggggatatatattctttaaccaagaaaaaggaagcatttttttcctgagaataagtgacttatttgcaaaagacccaccaaacagacccagaaaatgacctcgaaacattcttaaaggcttgtcaaggtcaaaattgatatggacaatgaagatgcagctagtgctttttataacatcctaccactgactcttgtaagagaagaacaaatcctttttcatgaaatgtcttccacctgcttttctacctagaaaactcctactcatccttgaggaccgaaataaaatttcctctatgaacatttttccaatccttccccaccttaaatatatacacacgcatcaatatcaatgaatcgttatcttctctataatgcctcaatagtttgttcataatttggttagtcagtccacaaacatcttgaagaaatatactaaaaatgtttagttgtgatactttcttatctcattaactggatatatattacaaattttaattttatatcctgattatctacagttatagtaataagagtgataaaaacatatttccagagccagcaatagctaatacatatacacagagctgtttctcttgtttcctcaaaattataaaatttcactttcttttatatgaggacttttattctctctcacaagaaatgactgaaaaaaaagccagacagtgtaatgtaaggtgacacagatttacaaatttttccccttattttacctgatgaaaattgcttttctgcttaacaatgttcaactttaccttaaacagaagctgcccgcacttaggaatatagatatcagagctagaggtgacagccacatcaatgttgaattcttactcaaagtcagttttcaagcttgaaatcttatcttatgtcactccattttgaagacgggagagaaaaaaaatgctggaatgttcagtccagtgggttggggaataatgagatagctagtctctgcagcaaactgaagtgtatccctttcaagacaacagacatttggtggagatctgtcaatagaccttcattagactctgtggattcagcctatgcttaagtaggttttctctagtctggtcttcacagaaggtagaatagttgcttctcatgaaagagacttcaaggagagggaaatttgtatcatgaatgagaaccagagggcagtaacggaaatggacaaaacccaactggggagtgttcctctaacccagggattgacaaacttttctgtaaagagccatatactaaatatttttcagttttgtaagacatatattcactgtagaaactacttaacctgcctttatagcacaaaaacagccaaaacaatataaaaataaatggacctggctgtgttccaataaaactttgtttatacaaacaggcagccagccaaaatttgctgccccctgttctgagacaatatttcccaaaatgctatatacataacaccatgagtacacgggtatactgattgattttaggtggctcacaaagagatattttaaattttaagttaagtttatgatttaatatttgctggaaataaacacataactgttttatcaaacatgatttcatgaatattattacttagtataaggataaatttatttttaagtgaaaaaagacataatttaaagaaaataagtaaataacaagagcatactgacattgcaaaaatcatttaggtagtaaatgaatggtcaaagctggaaatacagctctagatgtacttccatcctacccactggcacatatgacctcacttcatctaccactgttgttattattatactgggccagtggagaggtcactaagaggtcacttaagatctctgggcttgattttctgtctgaaaatggtcaattctcacaaattggtacacaagcgtgagatagtttgctatcttagcctttcaactattatatgaccacactcataattttattcagaataaatttttgatccttttaaagctaaagaaaaataagcctcctttcttgcaattttaaaaaataattcactttattaaatcacagaacattcactcaatggaaaattagaaataattatgttaatagctattgaggggtctgatgggaatagctttttgtttatatttttggccccaagtatgccatttataaaaatcatgtttcagaacatgttatgtcttaaaccatggagagtaataaaaggtcaaaatatgtaaaagttttttttctctcacttctttttctggatatttgagccttttgacaatttattctcaaactctctgtgggtttctgggtagaatcttaattcttaggtgatataagtgccttcgttctagaaaagatggaagttcagcacaggtatcaattccactgtgtattctcaatggcttttgttacatagatttctatagtcagtgtgggacaaggaatatgcagaaatgtctagacttaggaacaagacacagctggattcaaattcctacttcattgtttgtcttttgtagtctttcataaatatttcagataaactgtgtaaagtacctacctggtttctttttcttttttttaattattattttttgagatggagtcttgttctgtcatccatgctggagtgcagtggcactatctcagctcactgcaacctccgcctcccaggttcaagctattctcctgcctcagcctcctgaatagctgggattacaggtgcccaccatcatgaccagctagtttttatttttatttattgatttattgatttgagatggagtctcactctgtcacccaggctggagtgcagtggcgcaatctcggctcactgcaacctccgcctcccaggttcaagcaattctcctgcctcagcctcctgagtagctgggactacaggcatgtgccaccacacccagctaatttttgtatttttaatagagatggggtttcaccatattggccaggctggtcttgaactgctgacctcgttatctgcctgcctcagcctctcaaagtgctgggattacaggcgtgagccaccacaccatgcctagtttttatatttttaatagagatggggtttcaccatgttggccaggctgatcttgaactcctgaccccaagtgacctgtctacctggtttttgactagggtttgctacatatacagaaaaaaaaaaaaaatcaggcaatctgtattttatctggcagccctatcctgacacagtatacacttgatatatatttcagaagttgttatctttattggaaacacatgacatttctgtcttttcataggaagggggaaaggagaggtgatggtagttttgggacaaataagaacatgttttgcagtgagcactgttctagttcactttgtgctgctataacagaatacaacagaacaggtaattttaaatgaacagaaatgtatttggccatggttctatagactgggaagtccaagacagagagaccgcatctgctgagggcctttttgctgcatcatcccatggtggaaggcagaaaggcaagagagcataggtgagtggaccaaatgtatgtttttacagggaacacactccttccacaactaacccactcctgtcatgacagcattaatctattgatgaaggcagacccctcatgacctaatcacctcttagaggtcccacctctcaacattgttgcattgggaattaagtttccgacacatgaacgtttggggacatgttcaaaccatagcaagaattcaattaacttatgtttttccttagaaacagaagctctgttttagatttagaaagaaagaaaagaaagtccagttctgtgttaaacaaaatgaataccgaaaaagaacaaatgaaatgagaacaaaaattatgcttattagaaaagaggtcactgggcaggtaatatatctaccttccctgatagcaattttcttaaaactttacattgggtccacacttgaatccagttctttatagccctctgggcttatttaaaatacaacagatctattttattaaaaaagagattaaagttggaagacatatgaaatattccacccatatttccataatggagaacagttcccatgccttccagctgacacacgtttgccccttgtagaaactgtgaccacaggtttcatgattgcttctgtgagacagcatgtgccactgaggttcgtaaatctacagtttttcttttccccaatatgactgagtaaaaagaagttaatgttctctatcccaaaggacaaggattgagaatcaattgtgctctgcaattggctttctaggatgtgttctagattttctagaatgtttcttctcatagaccttctgaagatgaatgactaacagtgtctacactcagtatgtcaataaaaaatgaaaagtgagggtaaaaggctactctagaacctacttggactgtgaacctgaaaaaaaaatgagtttttgtcttaattcttttttttttattttttataaagacagggtcttattccatctcccaggttggagtgcagtggtgtgatctcagctcactgtaacctctgcctcctgggttcaagtgattctcctgcctcaacctcctgagtagctggaattataggcacctgccaccacgcctgggtaacttttgcatttttagtagagacggtgttgttggtcaggctagtctcaaactcctgacctcaagtgatccacctgcctcagcctcctaaagtgtggggattacagacatgagccacagcgctgggccttttttattcagatatgacatatatgacatgtgaccatttctaggtacagcatttaaaaagaaaaataaaacatctctgcttcctgcagtatagctaataaatgttctaaaaagcccttataaaagccataaaaaagcactcaaaatataactagatcctcaatgaattacacaatcaatcttttcaaagcattgctgagcttataagaaagtaagacatgtcaccacataggtcacgtaaggtggaggtggagggagggtgggaaagagacaatgagctgtagccagaatgatgaacaataaggaagagcaaaagatagcatttttattctaggacaaatgttgaaaccagtattagaaaggggagactaaacctagaacaagatgagaaactaaacctaagtcctctgcattgggcttagattctcaaacaaagtaaaagtggtgccagactagtagaaccactggctcctggtagaaacatacaaatcttttatggtgacagcaattccaatttagactctcagtgtctcacagaataagatcaattaaatacgagctcacaatatgaaatcaccaatatacagggaaacaagcaaccatgaataaaagtagcagacaataatacaaccactatagagaaaaatttggagtttcctcaagaaaactaaaaatagagctaccatatcaaccagcaatcctactgctgggtatatacccaaaagaaaggaaataaatatatcaaagagatacctgcattcccatgtttgttgcagcactgttcacaacagccaagatttggaagcaacctaagtgtccatcaacagatgaatggatagagaaaatgtggcacttatatacaatggagtattcttcagccataaaaaaggaatgagatcctatcatctgcagcaacatggataaaactagagatcattatgttaagtgaaataagccagacaaagaaagacaacatcacatgttctcccttatttgtgggatctaaaaatcaaaacaattggacatagagagtagaatgatgattaccagaggctgggaagggtagtgaggggttgggcgagaagatgggcatggttaatgggtacaaaaaaaatagaaagaatgaataagacctactatttgatagcacaacagagtgactaaagtcgacaataacttaattgtatatattaaaataaagagtataagtggattgtttgtaacacaaaggataaacgcttgaaggaatggatacctcattcttcatgatgtaattattacacattgaatgccatatcaaagcatcttatgtaccccataaatatatgtacatactatctaaccacaaaaattaaaaataaaaaatgttaatgtagatatatttgttttacagctaaaatttaaggaaacctttaaacaacaacaaataaagatgatacacctttaaaaatgcatactgtgttattggatacacaatataaaacaatatgaatgaaatgtttaaaaaaataaaaaattactaatgagcaaataaaaagaacatatcaaaaagaccttgtaaaataaaaaaaacaaattgaagttttagaaatgaaaaatataatagctaaaaagaactcactagaaattttaaagataaaattatttaacataactgaagaagtattagtgaactaaataataaatgatgttgggaaaattggacgtccatatgaaaaaaaaaaccttgacccataccttacatatcatacaaaaattaactcaaaatggctaatacacctaaaggtaaaacctaaaattataaaacttctcaaagaaaacataaaagaaaattttatgacattgggttaggcaaacattttctaactacagcaccaaaagcacaactgataacaggaaaagaatggttaatgagacttaatcaaaacgtgtaatttctgttctatgaaatacactgttaagagaatgaaaagataagccatacacttagaaaagatatttgcaacttacacttttgacatagaacttgtagcccaaataaagaactttcacaactcaataataataacataatcaacccccaaaaaggggacaaaagaacaggcacttcaccaaaaaagacacagatatcaaatgagttattagtcattagaaatcattacacaatactactcatcattaggaaagtgaaaattaaaatcacaatgagataccacttcacacaaataaaatggataaaatacaaaataatgacattaccaagtgtgagtgacaatgcagggcaattgcaaatctcatacattgctgagagaaattcaatatggtacaaccactttggaaaactgtttagtagtctctttcaaaaataagcatatgcctattatatgacccaataatcccacttccaggtatttccaaagaaaaatgaaaacttatgttcgcaaaaaaaccctaaacattactgtttataccgcttcatttataatcaccagaaacaacccaaatgtccttcacttgaaaaatagataaataaaatatagtacatccactgaatataattatagcaaaaaaggaagaactactgacacaaaaacatgtatgaattccaaatgcattatgcaccatttattttaaaaatatgctttttccattgaatttgttttgcacgtttatcagaaatcagttggctggacttctgtgcatgtttctgaactctctattgttgtattagtctatgtgacaatccctccatgaagtccacactgttttttattactgtagttatatagtaaatcttaaaatcagattgaattactcttctgttgttattctttttcaaaattgttttagttattctagttcctttgccttttcacaacaattttagaataagcttgttgatatccaccaaaaatccattttaatagaaatggagttaaatgagatcttaacagaaatggaattaaatgaataaatcattgtggggagaattgacatctttttaagttgagttctccaattcatgaatattgtatatctctccatttgtttaggtctttaactgttttttattgaagttttactgctttcaatagaaagatctcatagataagctattagatttatacctacatattttatttttgagggctattgtaaatggtatgttttaaattttgatttttgggggaggagccaagctggccgaataggaacagctccagtctacagctcccagcgtaagcgacgcagaagacgggtgatttttgctaaaggaggaagttcgaacccatggcaaagaagttaaaaaccttgaaaaaaaattagacgaatggctaactagaataaccaaggcagagaagtccttaaaggacctgatggagctgaaaaccatggcacgagaactacgtgatgaatgcacaagcctcagtagccaatttgatcaactggaagaaagggtatcagtgatggaagatcagatgaatgaaatgaagcaagaagagaagtttagagaaaaaagaatataaagaaatgaacaaagactccaagaaatatgggactatgtgaaaagaccaaatctacgtctgattggtgtacctgaaagtgacggggagaatggaaccaagctggaaaacactctgcaggatattatccaggagaacttccccaatctagcaaggcaggccaacattcagattcaggaaatacagagaatgccacaaagatactcctcgagaagagcaactccaagacacataattgtcagattcaccaaagttgaaatgaaggaaaaaatgttaagggcagccagagagaaaggttgggttacccacaaaaggaagcccatcagactaacagctgatctctcagcagaaactctacaagccagaagacagtgggggccaatattcaacattcttaaagaaaagaattttcaacctagaatttcatatccagccaaactaagcttcataagtgaaggagaaataaaatactttacagacaagcaaatgctgagagattttgtcatcaccaggcctgccctacaacagctcctgaaggaagcactaaacatggaaaggaacaaccggtaccagccactgcaaaaacatgccaaattgtaaagaccatcgaggctaggaagaaactgcatcaactaatgagcaaaataaccagctagcatcataatgacaggatcaaattcacacataacaatattaaccttaactataaatgggctaaatgctccaattaaaagacccagtggcaaactggataaagagtcaagacccatcagtgtgctgtactcaggaaatccatctcatgtgcagagacacacataggctcaaaataaagggatggaggaagatctaccaagcaaatggaaaacaaaaaatgtcagggtttgcaatgctagtctctgatgaaacagactttaaacagacaaagataaaaaaagacaagggcattacataatggtaaagggatcaattcaacaagaagagctaactatcctaaatatatatgcacccaatacaggagcacccagattcataaagcaagtccttagagacctacaaagagacttagactcccacacaataataatgggagattttaacaccccactgtcaacattagacagaacaacgagacagaaagttaacaaggatatccaggaatggaactcagctctgcaccaagcggacctaagagatatctacagaactctccaccccaaatcaacagaatatacattattttcagcaccacatctcacctattccaaaattgaccacatagttggaagtaaagcactcctaagcaaatgtaaaagaacagaaattataacaaactgtctctcagaccgcagtgcaatcaaactagacctcaggattaagaaactcactccaaaccactcaactacatggaaactgaacaatctgctcctgaatgactactgggtacataacgaaatgaaggcagaaataaagatgttccttgaaaccaatgagaacaaagatacaacataccagaatctctgggacacattcaaagcagtgtgtagagggaagtttatagcactaaatgcccacaagggaaagcaggaaagatccaaaattgaaaccctaacatcacaattaaaagaactagagaagcaagagcaaacacattcaaaagctagcagaaggcaagacataactaaaatcagagcagaactgaaggaaacagagacacaaaaaacccttcaaaaaatcaatgaatacaggagctggtttgttgaaaagatcaacaaaattgattgaccgctagcaagactaataaagaagaaaagagagaagaatcaaatagaagcaataaaaaatgataaaggggatatcaccaccgatcccacagaaatacaaactaccatcagagaatactataaacacctctatgcaaataaactagaaaatctagaagaaatggataaattcctagacacatacaccctcccaagactaaaccaggaagaagttgaatctctgaatagaccaataacaggctctgaaactgaggcaataattaatagcttaccaaccaaaaaaagtccaggaccagatggattcacagctgaattctaccagaggtacaaggaggagctggtaccattccttctgaaactattccaatcaacagaaaaagagggaatcctccctaactcattttatgaggccagcatcatcctgataccaaagcctggcagagaaacaacaaaaaaaaagagaatttcagaccaatatccctgatgaacatcgatgcaaaaatcctcaataaaatactggcaaaccaaatccagcagcacatcaaaaagcttatccaccatgatcaagtggtcttcatccctgggatgcaaggctgattcaacatacacaaatcaatcaacgtaatccagcatagaaacagagccaacgacaaaaaccacatgattatctcaagagatgcagaaaaggcctttgacaaaattcaacaacacttcatgctaaaaactctcaataaactaggtattgatgagacatatctcaaaataataagagctatctatgacaaacccacagccaacatcatactgaatgggcaaaaacaggaagcattccctttgaaaacaggcacgagacagggatgccctctctcaccactcctattcaacatagtgttggaagttctggccagggcaatcaggcaggagaaggaaataaagggtattcaattaagaaaagaggaagtcaaattgtccctgtttgcagatgactgattgtatatctagaaaactgcatcgtctcagcccaaaatctccttaagctgataagcaacttcagcaaagtctcaggatacaaaatcaatgtgcaaaaatcacaggcattcttgtacaccaataacagacagagtgccaaatcatgagtgaactcccattcacaactgcttcaaagagaataaaatacctaggaatctaacttacaagggatgtgaagggcctcttcaaggagaactacaaaccactgctcaatgaaataaaagaggatacaaacaaatggaagaacactccatgctcatgggtaggaagaatcaatatcgtgaaaatggccacactgcccgaggtaatttatggattcaatgccatccccatcaatctaccaatgactttcttcacagaattggaaaaaactactttaaagttcaagtggaaccaaaaaagagcctgcatcgccaagtcaatcctaagccaaaagaacaaagctggaggcatcacgctacctgatttcaaactatactacaaggctacagtaaccaaaacagcatggtactggtaccaaaacagagatatagaccaatggaacagaacagatccctcagaaataatgccacatatctacaactatctgatcattgacaaacctgacaaaaagaagaaatggggaaaggattccctatttaataaatggtgctgggaaaactggctagccatatgtagaaagctgaaactggatcccttccttacaccttatacaaaaattaattcaagatggattaaagacttaactgttagacctaaaaccataaaaaccctagaagtaaacctaggcaataccattcaggacataggcatgggcaaggacttcatgtctaaaacaccaaaagcaatggcaacaaaagccaaaattgacaaatgggatctaattaaactaaagagcttctgcacagcaaaagaaactaccatcagagtgaacaggcaacctacagaatgggagaaaatttttgcaatctactcatctgacaaagggcaaatatccagaatctacaatgaactcaaacaaatttacaagaaaaaagcaaaggaccccatcaaaaagtgggcgaaggatatgaacagacacttctcaaaagaagacatttatgcagccaaaagacacatgaaaaaatgctcatcatcactggccatcagagaaatgcaaatcaaaaccacaatgagataccatctcacaccagttagaatggtgatcattgaaaagttaagaaacaacaggtgctggagaggatatggagaaataggaacacttttacactgttggtgggactgtaaactagttcaaccattgtggaagtcagtgtggtgattcctcagggatctagaactagaaataccatttgacccagccatcccattactgggtatatacccaaaggagtataaatcatgctgctataaagacacatgcacacgtatgtttattgcggcactattcacaatagcaaagacttggaacccacccaaatgtccaacagtgatagactggattaagaaaatgtggcacatatacaccatggaatactatgcagccataaaaaatgatgagttcatgtcctttgtagggacatggatgaagctggaaaccatcattctcagcaaactattgcaaggacaaaaaaccaaacaccacatgttctcactcataggtgggaattcaacaacgagaacacatggacacacgaaggggaacatcacacaccggggactgttgtggagtggggggaggggggagggatagcattaggagatatacctaatgctacatgacaagttaatgggtgcagcacagcatcatggcacatgtacacctatgtaacaaacccgcacgttgtgcacatgtaccctaaaattaaagtataataaaaaaaatttttctattttcatttgggttgtttgttgctagcatgtataaatatgatttatttttctttatagtgacattttgctaaactcatttgtaagctctagtagtttgttagtaggctccttgccatcatctataacgacgatcttgtcatctgaaaataaaaacaaacatcttttttctcccttcctcttatgccgtttcttttctttccttcttgcactgggttggactttaagcattatgttgactatgagagtgacagctgacatcatttcctttttccccacataaaggggaaagcattcagtctgtcaatattaagtattatgttaggttttgtgaagatgttgtttatcaggttggggaagttactttaagttttagtttacttagattttttatgagtgggtgttgaattttgtcaagtgctatttctgcatcagttgatttaataatgtagtttttattctttattgtggtttgtattgattgactatgattattaagtgttaaaccagccttacattcctgaaataaattctacttgggcatattatattattctttccaaatattgatagattctatttttagtattttgttaagggttttttttttcatccacattcaaaaagaatattgttctgtaggtttcctttcttgtactatctttggtttaggtatcaggatagctgccttcaccatatgagttgggaagtgttgctgtttcttctatttgatgaaagaaagtgctcagaattggtcttatttcttcttttaatatttggtaaaaatcatcgctgcaagtgtctgggcctggagatttctttgtcaggtttttataagactattaaagattatctgtttcatgtttgctttgataatttgtagattttgagcaattagtctatttcatctaaatggtcaaatttgtgtgcatagagttgctcatagtattcccttattatttatcctctgcaagttacatcctgtgtttcactcttgatattggtaatttgtgccttctctctcttttctctttgtcagtattgctagaggcaactttatttattcaattttatatccatgtataaaaatatagtgtatatatagaatatagatacagatatgtataacaataaactgtacactatagtatatactctattgttagcaatatagagtatcgtctattgtttttactttttcaacttctgctattatctttattatttttctttcctacttgctttgtcttatttttgctcttttgttctagtttgttcaggtggaaacttattgatttgagatttttcttcttttcttttttttttatttttaaatttgagacagggtcttactctgtctgtcaccgaggctggagtgtagtgacatgatcttagctcactacagcctcaacctcctgggctcaagcaatcctcccacctcagcctcctgagtagctgagactacaggcaacactgccatgcctggttaattattttttattttttgtagagagagggttttgccatgttcctgaggcttttctcgaactcctgggctcaagccatgctccttcctcagcctcccaaagtgctgggattacaggtgtgagccaccacacctggccttctgtttctactataggcatttatttgttgctgtaaattttgctgtaagcactaatttaattgtatcccacagattttgatatgttgcattttcatcacttttagttcaatacattttttttatttcccttgaaactttctcattaaactttagattatttaaaaatgtgttgcttagtttccaaatgtttggtgattttcctgttatctctttgttattcacttctagtatgatttcattaaggtcataaaacatattttataagatttaaattattttaagtttgttatagtttgttttatgacccagtatgtactctatcttgatgatttttcatgtgcctttgaagagaagtatattctgctacggttgtggaatataccatatattccacatggatgggttgtgactatgctaattaaatcttgctaattatggaattgtttatttcatcgctatccttactaattttcagtctagtcagttataaattactgggagaggggtgttaaagtcctctaactataattgtgtatttctcaatttctctattcattcctgtcagcttttacatcaagtattttgaagttttgctgtttgatgtacacacattgaagattgttacatcttattggtaaagtgaccattttatcattatataatgatcatcgttttcctagtaattttctttattatgatgtttcctaggtgttacattaatatatcaattccagctttattttaattagtatttacatgttatatcttttccaccatttttcttttattctacctatatcattgtaagtgaatttcttacagacaatatataggtggatgatgcttttattcattctgatcatctttgtctttcaattgctatctttagactaaaggttggacttttttgtaaatgacttcatagtaaatattttcggcttttcatgccatatatagtctttgttttatagtctttgttttatagtctttgttttgtttaaacaaccctgtacatgtaaaaaccaaaaaatgagcaaactaagaatatagggaacttcctgaacttcataaggagcatccattaaaaacctgtggctaacatgattcttactggtgaaaacctttctctttaacttcaagatcaaagcaaggatgttcattctcaacacttttattcaatgtagtaatggaagttgttgccattggaattttaaaaacacacgtattggaaaggaagaaataaaactgtccctatttgcagatgatctacatgtctatgtaaaatttcatggaatctccaatgaaacaaattatagcaaggactcatatctgaacgacttcacatatttgagtttttcacggtgaattaaaggaatttcaaacactttcctctaataataatatctacaatagtagtttccaactctctttactattttttctgtatttgcctaatccaagagcccttcctcctatctctttcctactatgattcgtatgactgggataagtgaacttgtgtcattaatccaataatagataccaaatattcttagtcacccattcagatatacctttctaattcctacatattaaaatataataaaaaatgacaattatgtatttccttaagatttttatgcctcattttttatgactaaaccattcatttatttttggattatctaggtttttcaatactgctttcataaatcgattgtacaatttatagcttcttgtagtaaagtttcttttattacagtacatgttcaattttttcttcttctactttcatattatattctaggggtacatttgcaagtgtgttacatgggtaaattgcatgtcactgaggcttggtgtatgaataaccctatcaaccaggtagtgagtatagtacccaagaggtagccttccaacccacactaccctgcacccttaccactcaagtattgcccagtgtcttttttccccatatttatgtccatgtgtattcaatatttagcttctgctcataagtgacaacaggtggtatttggctttctgttcctgcattagtttgcttaggataatggcctctagctgcatctatgttgctgcaaaggctacgatttcattactttaatgactacatagtattccgtggtatatatagtccacattttctttatccaatcaactgttgatgaacatcttggttgattccatgtctttgctattgtacatagtactgcaatgaacatgcgagtacatgtgtctttttggtagaacaatttttttttccttggatatataaccagtactgggattgctgggtcaaatggtagttctatcttatgttatttaagaaatctccacacaggttttcaaaatagctgaactaatttacattcccaccggcagtgtataattgttcccttgcctccacaacctcatcagtatgttgttttttgactttttaataatagtgattctgactgttatgagatggtatctcattgtggttttaatttgtatttctcaaagagtagtggtgatgagcatattttttcatatgtttgttggcagcatgttcattttcttttgaaaagtgtctgttcatgtgctttgcccactttttaagggagttatttgtttttggtttgttgaattgttcaagtttcttatagattctggatattggacctttattggtgatatggtttggctgtgtccccacccaaatctcatcttgaattgtagtttccataatccccatatgtcataggagggacccggtgggaggtaattgaatcatgggggcagttacccccatgctgctgttctcatgatagtgagttctcacgagatctgattgttttataaggggctttcccccctttgctcagcataagaaagacgtgtttacttccccatctgtcatgattgtaagtttctgaggtctccccagccctgcaaaactgtgagtcaattaaacctcctgactttataaattacccagtctcaggtatgtccttatagcagtgtgagtatggacaatacagttggatacagtttccgaatgttttctcccattttgtaggctgtctgattactctggtgatagttccatttactgtgtagaagcactttagtttaattaagtcctacttttcaatttttgtttcttttgcaattacttttggagacttaatcataaattatttaccaaggctgatatacagaatggtacttcctaggttttcttcaagggttttattttttatttttgtgggcccaaagtaggtgtatatatttatgggatatatgagatatcttgatacaggcatacaatgtgtaataatcacattaggataaatgggatgtacatcacctcaagtatttgtcttttgtgttacaaacaatctaattatactcttttggttatttttaaatgtgcaattaaatgattattgactatagtcatcctgttgtgctattgaatactagttcttattcattctttctattttttatacccattaaacatccccatttccatcaccccaatcaactaccttttctagcttctggtaatcatcattctactctctttctctatgagttcaattgttttaattttttcctcccacagataaacgagaatatgtgaagatgagtttgctgtatatgtatggacttgtttctaggttctctattctgtcccattggtctgtccctatgtgtctgtttttattccagttccatgctattttggttactgtagctctgtagtataatttgaagacaggtaatgtgattcttccagttttgttctttttgatcatgatagctttggctattctgggtcttttgtggttccatatagattttaggatttttttttctatttctgtgaagaatgtcattggtattttcatagggactgcatttgatctttggattgtttggggtcctactgacattttaacaatattggttcttccaattcatgaacatggaatatttttccattgttttgtgtttctttcaatttctttcaccaatctgttacagtttttattgtagaaatctttcacttatttggttaagttaatttctaggtacttgattttatttgtaggtattgtaagtaggattactttatatatggtaatactggttttgtacaatgagtttggaaatagttcctcttcctctattttttggaatagtttgagtaggattagtattagctcttctttaaatgtttggtagaattcagcagtgaagacatcagttcccaggcttttctttgctaaaaagtctttttattatggcttcaatctcattacttgttactggtctattcaggttttgaatttcttcatgacttaatcttggtaggttgtatgtgtctaggagtttatccatttcttgtatatttttcaatttattggcatacagttgctcatagttgccactaattatcctttgaatttctgcagtatccattgtaatgtctcttttttcatctgattttatttgagtcttctcttttttcttagtctggctaaaggtttgtcagttttatttatcttttcaaaaaaacaacttttgttttgttgatcttttgaattgttttctccatttcatgtatttctgctctcatctttattttctctactaatcttgtgtttggtttgttcttgtttttctctttaaggtgcattgttaggttgtttgtgtgaagtttttcttctattttgatgtaggcatttagagttatatacttctctcttagtactgctttcattgtatcccataggctttggtatgttgtgtttccattaatattggtttcatgcattttctcaaattcctgcttaactttttcattgacccactggtcattcaggagcatgcatattgttgaatattcatgtttttgcataatttccaaaattcctcgttattgaattctagttttattccattgtggttagagaagatgcttgatattgtttcaatccttttgaatgttttaagatttgttttgtgacctaacatataatctatctttgagaattatccacttgctgaggaaaaaaaatgtgtattctgcagttgttggatgaaatgttctgtaaatatctattaggtccatttggtctatagtgcagattaagtccagagtttctttgttgattttctgtctggaagatctgtccaattctgaaagcaggcgttgaagtctccagctattattgtattggggcctatttctctcttgagctctaataatatatgctttatatatctgggtgctccactgttgggtgcatatgtattttcagttgttttatcctcttgctgaattgacctttttatcattatatagtaatcttttttgtctcttcttataggttttgtcttgcagtctattttgtctgaaataagtaaagcaatttctgttcttttttgatttccattgtcatggaatatctttttccatccctttattttcactctatgtgtgtcattgtaagtgaagtatgtttcttgtaggctacaggacattgggtcttattttttatccattaagccactcaacatctttttattggagagtttagtctatttacattcaatgttattattgataagtgcggacttacttctgccatttcgttacttgttttctggctgttttgtggtgttctcttccttttttccttccttcctgtcttccttttagtgaaggcaattttctctggtgatataatttaatttcttgctttcaactttttatatatctgctgtatgtttttaaatttgaggttatcataaggcttgcatatactattttataactcatttcttaagctgaacaacttaacattgttgcaaaaagaatcaagcaaaaaaaaaagtaataaaaactctatgctttaactttgtccccatgctttttaactttttctcgtttctatatttatatcttattgtactatctatgtcttgaaaagttgttgggtttatcatttttattggttcatttagtccttctacttaagagtagtttgtgcaccacagttacagtgttataatattctgtgttgttctgtgttcttactattaccagtgagttttgcaccttcagatgatttcttattgctcattaacattcttttatttctgattgaagtactttttccagaatttcctgtaagacaggtctggtattgatgaaatccctcagcttctgtttgtctgagagagttgttatttctccttcatgtttaaaggatattttgactggatatactattctaggataaaagattttctttccttcagcattttaaaattgtcataccatagttaaagtgatcaaggggggaaaaaagcattttacctgtaaggtttccactaaaaagtctgctgccagatgtactggagctccattgtacattatttgttttttttatcttgctgctttcagtatccttgacctctgggagtttgattattaaatgccttgaggtagtcttctttgggttaaatcttcttggtgttctataaccttcttgtacttgaatattgacatatttaagtcaatgttactgacttctctaggtttgggaagttctgtgttattatccccttgaataaactttctaccccaaactctttctctacctcctctttaagaccaataactcttacatttgctctttcgaggctaatttctagatcccatcagcatgctttattctttaattctttttttgtctcctcagactgtgtatttacagacagcctgttttcaagcttagtaatttttaattctgcttgatcaattctgttatttaaaatctctgatgtcttcttcagtatgtcaattgcatttttcaattccaagatttctgcttgattctttttaattatttcaatatatttgttgagtttctctgagaaaattctatattccttctctatgttatcttgaatttctttgagtgtcctcaacatagctattttgaattatgtctgaaaggtcacatatctccgttgctccagaattgggatctggtgacttatttaggttgtttggtgaggtcatgttttcctggatagtcttgatgcttgtggatgtttgtcagtgtctgggcattaaaaagttagatatttattgcagtcttcatattctggatttgtttgtacccatccttcttgggaaggctttcagggtatttgaagggactcaagtgttgcaatataagccatatctgcattaggcagcacccccagcccagtaatgctgtagttcctaaagactcatagaggtacctaccaccttggtggtcatggataagatctaggagaattttctggattatcagacagagagtcttgttctcttctcttaccttctcccaaacaaacaaagtctttttcttggtgctgagctgcctggagctggggaaggggtgacacaagcacttgtgtggcaaccaccacaggaaccgtgcttgcacagacctaaagccagcacagaactgggtcttgcccaaggcctgctataaccactatctggctactgcttatgttcactcaaggccctagggctctacaatcagcaggtggcaataccagcaagttttatgttcttcccttcaaggcagtgagttctcagacaggtccagagatgttgtccatgagccagggcctaaagctggaaacattagaaatctatctgatattctagggtactgcaattaagctggcactgaaaccacaagacaaagtccttcccactcttatctcctctttctccagacagcggagtctctcctcatgtccactactaccacaggcccatgggaagtattgccagggtatcaccagtgttcacttacatcccaaaggctctttagtcagcttgtggtggattttgcaggcctgggactcacccttcagggtagtagtctcccctctggcccagggtaggaccacaagtgccatccaagagccaagtcctaaaactggggacccaaagagccttagtgttcttctccactgtggtcaagctggtacctacattgcagaacaacaaagtcccctttactcttccctctgcttttttcaagcagaaagagtctcttctcatagccatcacagctatggatatgctaggtcacacctgaaaccagcacatctcagagtctcacccaaggcccacagtgtgtactactgggcctggaatgggggcctcacgactctgcctggtgccctatcctactgtggctaaactggtattcaagttggaaaacaaagtcctctttactcctttttcttctttcctcaagcagatagaagaggcctctttaggagttacaagctgcacagcctggggttgggggagggatgacacaaggactcctttagttaccccagctggtgtttcactaggtcacgtgcccccaaaggctactggctccaagcccattatagcacttggacttgccttggagttgcagtccttgtggcctagactgccactgaagtttattgaggaccccagagccctttaccccatagtggttaggcttgctgaaactcaagttccaaccactggcatgggtaattcccctctatctagggctcatctaaatgctccctctgtgggcatgggctgagttctgcctggtgttgttttctgctgtaacagggcagcactgagttccaatgcaaagtctcacaaatactgtgctctacttccccaaacacacagattctctttctgtgccacatggccactgccaggagatgagggaggggttttgttggtaattcaagattgtctttcctatcctcttcaatgcttcttttagcaatatgaagttaaaaccaggtactgtgattgtttacctgatttttggttcttatgagggtttcttttgtgtaaatagttgtcgaattcggtgttccaaatttggggaggataattggtggaagcttctgtttggccatgttgctttgcctccttcccttctagggttattaatgttttaggtcttacatttaagtctttaatccatctttagttaatttttgtacatggtgaaagataggggtccacattcattcttctgcatatggatagctagttgtcccagcaccatttattgaatagggagtcctttgcccattgtttgttattgttgacttggttgaagatcaggtggttgtaggtgtgtggctttatttctaagttctctattctgttccactgttctatgtgtctgtttttgtaccagtaccatactgttttggttactgtagcattgtagtataatttgaagtcaggtagcgtgatgcctctgactttgttctattggttcaggattgtttcagtaattcaggctccttttttagcttcatatgaattttagattagtttttttctaatcctgtgaaaaacggcattgatagtttgataggatagtgaatttctttgaaaagtatgaccatcttaacaatattgatttttccaatccatgcacaatgggatgttcttccatttgtttgtgtcatctctgatttctttcagcagtattttgtaattctaattagagatctttcacttccttggtgagctgtatatctaggtattttgttccttttgtggctattgtaaatgggattaggtttttgatttggctctcacttggatgttatttgtgcatagaaatgctactaatttttgtacattgattttgtatcctgaaactttacatatcaatattgatatgggaagatttgattctatcattgtggtgttagatagttgttatatagaacttaattgtatagttgctttatagtgtcaatagtaaatgtaaagtgtggtttttgtggtggcatgtatctttctttcccatgtttaatgtttagcactccctttaggacctcttgtacggtgtgcctagtggtagtgaattctcttagcatttgcttgtttgaaaagaatcttatttctcctttgcttgtgaagcttagtttgacaggatatgaaattcttggtttgaatttcttttctttaatgatgttgaaaataggcccccagtctcttctggcttataaggtttctgctgaaatgtctgcttttagcctgacgagttccctttgtaattgacctgcctcttttctctagctgcctttcagatttttttcttttgcattgaccttagagaatctgatgggtatgtcccttggggatagttactttatatagtatcttaaacaggttctttgaatttcttgaatatgcatgctgaaagcaagactggggaaattttcatggactgtatcctcaaatatgttttccatgttgcttcctctctctctttccctttcaggaatgccagtgagttgtaggtttggtctctttgcataatcccatgtttctcagaggttttattcatttttctaaattctgttttctttatttttgtctgcctgtgtttctttgatggagtggttttcaagttctgagattcttttctcagctcgatctgttctattcttcatgcttccaattgtattttgaaattcctgtagtaaattttccatttccagaagttcagtttgattctttcttaaaaggttatgtcatctttcaatccttggatcattttactgttttccttagattgagtttgaatcttctcttgtatctcgatgaacttccttgccatagattcttaattctatgtctgacatttcagccatttcaatctggttaagaaccattgctagggagctagtatgatcatttggatgtaagaagacacttttgccaggattttggcactggttctttctcatctgtgagaactgattttcctttatcctttgaatttaaataaaaagttctttggatagggctttttgttttatattcgttactgtccttgagggtttgactctgctgaaagttgggtataggtgaatggcttcatttctagatgctttcagagggccaaggctcagctctgcactcctggtctgcatgctctaaccttgggtggctgggactgtgcccatgactttgtcctctaatttctcaaggtcaagaaccagcttggctggaggggtcaaggtgctcctggaccactggcaacagcactgtgtctagggcagtggtggggcaggggggaatgagtaggaagcgctctggtgggaggctgtcagcaaaagcactccagtagggtggggtgggggggcctccaaagaaagtgctatggcagtggttactggcaaaagcaccctggtaggttagctgaggctgtgctgcattctggcatgccagacagggactctgggaggggctggtggacagtggggtacagagctctgactcaccctggtcatacagaaaagacagccctgctctgtcaggtccagtgattatactatgcctcattttagacctgatataattctctttagattctagatatataacaaatgctaatatatctgggccacatatgctataactgaaaaatatttgagagttttaagtgagaagattcttttcttctcactttcttgagtgttcagaaagatttctattgaacttgctaaaattatatcctttcacaagactcttagaatagatatttatttccccccaaatggtcttcttgtgagactatggttgctatctaatgataatccatgatctgattattttcctagaatctttcaaatgaagttggaagaaaacaagggaataggaaataaattttggcaaaattgtaggcactggtacacagcagaagttaccataggaaacaaaatatttttgcctcattttatggatgagaaaaccaaggcttagactgataaaataaatttcctcaaagacacacaaacagtaaatgacagagccagaatttagaaatgcaaattcttgggcctcattacagaccttctgaaactcttgggtaggacacagcagtctatgttttaataaactttttttgggggggtgggggacaaagtctctctctgtcacccaggctgaagtgcagtggcacaatcttggctcactgcaacctccatctccagggttcaagtgatcctcccacctcagcctcccaagtagccgggattacaaggatgcaccaccacccccagctaatttttgtatttttagtagagacgggatttcaccatgttgactaggctggtctcaaactcctgatgtcaggtgatccacctgcctcagcttcccaaaatgctgggattacaggcatgagttaccacacccagccatgattttaataaacttttaagtgattgtgatgcactctcaaatttgaaaactgctatgtcagaccaattcacaaaaatggaggacacaggcttagtgtttaaaagagcaaggcacagaacagggctgtctctttataaaaagagatctaatgtatagcattgtgactatacttaataatactgtattattacttgaaatgtgctgacggagtagatcttaagtgttctcattacacatgcaaaacaaggtaactatatgagatgatggatgtgttacttaactgtggcaataatttcacagggtatatgtatatcaaaacatcatattgtcaccttgattacatataattttgtttgtcaattatacctcaataaagctgaaaaaaagagagacagagactagataatgaatggtctctagtttgtacccttgggaataacccaggaaaattactcctacttataaacacactttgggaataaaatttagaagataataaaacaggcatgtctgatgccctaaagagagatggaataatttagctgttttcttttttagcatcttcaaactggaaagacctgataactagactagttacaagattcaaaaaggtgaactgatttgctccaaatcacacaactacttggttggcggaagagctggaaataggacataagttctagaggccaataatctagttagggcttgttatactgggcctccattattttcctcttcacattcttccaattctttttttgacattctcttccaggtcacaacttggagtctaagatgatttaactttgaaatactgaaaataattttaattttttactcaacctttctacttcctggctctgggccaaagaagctggccacctgttcttaatctattcttatcagctggaaaataactgagagatgccaacagtaacctggctgaggactagggcatgggactccatgttaaggaagccacagtccacagggaaattatgggacagctgtcaggcagagaagtaaacaggaataaagatgcaacaagttgctgatgtgattgggaacgtttttccttcctaggtttccctctacattataatatagttttcttggaagaggcacaatagagaaattaaaaattagataagagggaccagcaacgttgttgccagtgacaggaacatggaggacagagatagaaaacaggtctgaggtagcaggaaacaattaactataaccctgattagctaagcctctggccaaaaaaggtgaaaaaacagaagtcaggtagctgtataggttttccagatatgaaagggatatagaacaagaaacagaactcaagaaaattttaagaactattaggacaataagaaagggagagaaagctattttgtaactgcaaagaaaaagcaagagaatgaatctgacttcctgatttggaggtgaggaagacgctgcagggaaccaatgattagctgaatgtaagatgcaatgccagtctgatacattagtctttacagaaaatttaaaagttgggagggaagtaatactctggttatggttttattctaaacagagatacattgtggctggaaaatttgtataaagatgataaggcaaattgatacaaaggaagtagcatgacttgctccaccataatgggtagcacaagtggccttgggcacagcatgagtgtgagtggaactaaccagggcaacgagtgggggcatgtcaaacaagcaaccatatcagaactcaggtacaagatcaaggggagagttgagaatgattccaattattgtcatatcaggaaagtgtgtagaataagaaatagggactcagagaaaaaaggtgaataaagcaggagatgagcaccaaatcaccaaaaatgctagaaagctagcatttatgaccttctaaatcaagtgggagctggttccatagtgggttttcaagttggcatcagaagttggggaagtacctgctaagaacttggcttaaaccaagttctactctttcagcatcagtctccttatgtacagagaaaatgatacttggttggtacaaaagtcattgtagtctttgccattacttttgtttttattttattttaagttctgggattcatgtacagaaggtgcaggtttgttacataggtatacgtttgtcatggtgatttgctgcacctattgacccatcctctgggttccctccctttgcccccactacccctcaacaggccccagtgtgtgttgttccccttcctgtgtctatgtgttctcattgttcaactcccacctatgagtgagaacatgtggtgtttggttttctgttcctgtgttagtttgctgaggatgatggtttccagcttcatctatgtccctgcaaatgacataatctcattcctttttatgggtgcatagtactccatggtatatatgtaccatattttcttcatccagtttatcattgatgggtatttgggttggttccgtgactttgctactgtaaatagtgctgcagtaaacatacatgtgcatgtgtctttacagcagaatgatttatattcctttgggtatatacccagtaatgggattgctgggtcaaatggtatttctggttctagattcttgaggaatttttgtcatgtcttccacaatgattgaactaatttacaatcccaccaacatgtaaaggcattcctatttcttcacagtcccacaagcatctattgtttcttgactttttaataattgccattctgactggtataagatggtatctcattgtggttttgatttgcatttctctaatgatcagtgatgttgagctttttttcatatgtttgttggccacaaaaatgtcttcttttgagaggtatctgttcatattcttggcccattttttggtggggttgtttttttttcttataaatttgtttaagttctttgtagattctggatattagacctttgtcagatggatagattgaaaaaattttctctcattctgtaagttacctgttcactctgatgatcatttcttttgctgtgcagaagctatttagtttaattagatctcatttgtcaattttggcttttgttgccattgcttttggtatttttgtcatgaagtctttcccatgcctatgtcctgaatggtattacctgggttttcttctagggtttttatagtttggggttttacaattaagtctttaatctatctttagttaatttttgtataaggtgtaaggaaggggtccagtttcagttttctgcatatggctagccagttttccatttatttaatatgaaatcctttccccattacttgtttttgtcagatttgtcaaagatcagatggttgtagatgtgtggtgttatctctgagatctctattctgttccattggtttatatgtctgttatggtaccagtaccatgctgttttggttactgtagccttgtagtatagtttgaactcaggtagcatgatgtctccagctttgttctttttgcttaggattgtcttggctatacaggctcagtgagaagaatcaagtagacacaataaaaaatgataaaggggatatcaccactcaccccaccaaaagacaaactaccatcagagaatactataaatgcctctgctcaaataaactagaaaatctacaagaaatggaaaaattcctggacacataccccctcccaagattaaaccaggaagaagttgaatctctgaatagaccaataacaagttcagaaattaaggcagtaattaatagcctaccaaccaaaaaaagcccaggactacccgtattcacatcaaattctaccagaggtacaaagaggagctgacaccatttcttccaaaactattccaaataattgaaaaggagggtctcctccctaattcattttataaagtcagcatcatcctgataccaaaacctggtagagacacaacaaaaaaagaaaacttcaggccaatattcctgatgaatattgatgcaaaaattctcgataaaatactggcaaactgaactcagcagcacatctaaaaagttatccatcatgatcaaatcagcttcatccttgggatgcaaggctggttcaacataagcaaatcaataaacataatccatcacacaaacagaacaaaagacaaaaaccacatgattatctcaacagatgcagaaaaggcctttgataaaagtcaacatcccttcatgttaaaagctctcaataaactaggtattgatgggacatatctaaaaataataagaactatttatgacaaacccacagccaatattatattgaatgggcaaaagctagaagcattttctttgaaaactggtacaataaaaagatgccctctctcaccagtcctattcaacatagtattggaagctctggccagggcaatcaggcaagagaaagaaatgaagcgtattcaagtaggaagagaggaagtcatattgtctctgtttgcagaagacatgattctatatttagaaaacacaatcatctcagcccagaaactccttaagctgatatgcaacttcagcaaagtctcagcatacaaaatcaatgtgttaaaatcacagacattcctatacatcaacaattgacaaacagagagccaaatcatgaatgaactcccattcacaattgctagaaagagaataaaatacctaggaatacagctaacaagagatgtgaaggatctcttcaaggagaactacaaaccgctgctcaaggaaataagagaggacacaaacaaatggaaaaacattccatgctcatggataggaagaatcaatattgtgaaaatggccatactgcccaaagtaatttacagattcaatgctattcacatcaaactaacactgacattcgccattacaatagaaccttattcctcctggtgccgtacctgactctaaccagtgattgtggaaatcaaattaaaagtaatgtatgcagaaaaggctatgaaacacaaatgcaagatgatggtattatgatgtcattttgctaactctactccattatattggtttaatgagaggagtggtatatttgtgagctacaaagacaaaaaaaaactcaggaatgatactcttggcacagaggttaagctcaggcaaacaacacagtgaaactttatctgaacaggatttatactgtccttcgcaaagccaccaactattaaattaatgtttctctttatttttttccactgcaacaataggggggttgattcttacttgatagatatagcatgcatcccaattacagtgtctgacactacaaaacaaatgagtatctcatactcaaggactctgttattcttaaaggcagagaaaagagaaacagagagtccaacttacctccaggaccctttgctgatgctatccttcgggttatagactctgagggcaggaacaggtgtgcctcatttctgtctgtatgtgcataaagcaagggccgttcctaggatacgtcttaagtgaaatatgcccactcagcaacagaggtagcactagaatacatatttattttatgtttttgaaacttctattggttgttatctgatatagacagcagactttgaaaactgggcaaaagtagagaacctgtcactacaattacataacagatgagttgctgatatagacactgttaattgtctatgcagtagccattattccttcttcactcctttccttctaacctgatttgttcagggtagcaatatagccatctaaaaatatgtaacttcccaacctcccttatagacagtggtggtccaatggcacatgtatggccaatgaaacataggcaaagtccctgaggtgggtgcctcttcctagataaaagaagacattcctccaccattcaccattctttctactcataatgcaatcatgaggcctagagatgcagtcaccatctttcaccatgaggtgacaatcatgagaatgaagagctacccagtgaggacggagcatggaaaaatggagcccaagttcccaggggcatcactgggcagctgcaccagtcttggattgcctgcctctacgctttttacgaagtgagaaaagcaaatcccttgtttaaacttctctcacttggcctctcttttattttcagcagaatatattcctaagtgacaaaagaaacttttcagagagataatgggacttatgagccgtaacagttcatgggagccatttaccaggaagctatcagtgaagtcagtttgcaggcaaataagaatgagaaggaaattctaaagagaggacatagagagactgatgtttacctgatatatcactgttctgacataagtagaaaaagctaatggcattttaaaagcagcaaactacagacatgactcttgcaggattattccatctattaacttataaatatttattgagccctgttttgtggccagtgtcctcctcctcctcctcctcttttatttgtttcattatttggaactccaagattcttccctggtagaaaataaaactctcctccaaggatcttaaaatgcttcagcaatatcttcagagaaatgtcatgcactcatttactgggaattttctctaagttactcactcgctcagtaaaaggggtagtaatagaatacacatctattctacctttttcaaaacttctattcattgttatctaatgtggtctagaaactttgaaagatgagtaaaaatgagctgagtttctaatcctaatagaataatacatctaatgctaaccattatcatgttatgctgcttgataattttacctaaatgatttctaatatacatgaatgatgattacttgtatacaaacaagaaactttttctatctttgtcctcattttgttggtttttcaacgtctagaattagcagaaaaacccatggaattattattttagcatcaccatgtacacacccacatatacagcaagaaaaatatgaagtagattaattacccaggccttctcccagcaaaaggtgagtgccccttgcttttgccttgcccatccttcgttgcctgccttaactctgtccacactgcataagtaattccttaattaaactctcttcttgtatgtgtgcaaagagccacctaaattttggttgcattttttcccaaaatctattgaatatctttaatcaaggtattcaatgaataaagaaccaaaatatttaagcttttaatcaaatgtaataattgaaataaagtctgcagatggaagtcattaaaacattggtacaaacacaagagacaaaccaaacaaaatacatgatgagaactcagatcataaataaataaataaaaataaactctgctactaaaattttcaagtttgtcatctattttctcccaggatcctgacctatacaaaggttcatataacaagactccctccatggttagagggtggtcctgaggagagaacacaccacaggctcaccaagctccacactcctagcatcttcccagttcctcaaagtacattaatggactggagacacagagacccttaaaaatattaaaagggtcaatatgtcaggaaaacatgatcattacaaatgtatatgcatctaattacaaacatttaaagtgtggggttaatcactctgtggttctctccatgttacatgttaataaaatattttttaaaaatcaaagtatatgaagcaaaacttgatagaactaaagggagatagacaaataagcaatcatagctgcagatttaaacatacctctcttaaaaatggtataatgactagattaaaaatcagtgaagatatagaagttccacagaactgcctccctttctgtcacaccattgcccataatacctataccaggggatacacctactattgttatttagagataaaaatgatttttaaatgctagcacactgatgcataccagtcaaattgccaataagatatgaaatcccttaaggaggatgtaaaacgtggagggctccttatgacacttagaaagtcatagaaagggggaacttcagagaatgaagaaatccacgtaaaagagagattcgacattcaaaagagagaatctgataaatgattcaatccatttatacaaagttctaaatggcatcaatagggctaggagtcagaatagtggctactcctgagaaataattactggaaggtggcatagaatgaacttgtgggatagaggtcatattctgtaaaccaatcttggtgctggtaatactgctgtggtcaatttgtggaaattctttaagatatatgcttataatttgtgcaatttttgaattgcatattgttcttcaagagcaaaacaaaacattttaaaaagacaaactccatgaacttcacacttcaatttcactacttggcttggcttcataaatgttcattggaacagggaaatgacacatgcaaagatatttcatatcccattgtgcttggcatatgtgcattcgagggaaaccttaaccctcattacagtactaaaaatcacaaagctagccctatgtagaaagctgaaactggatcccttccttacaccttatacaaaaattaattcaagatggattaaagacttaaatgttagacctaaaaccataaaaaccctagaagaaaacttggccttaccattcaggacataggcatgggcaaggacttcatgtctaaaatactaaaagcaatggcaacaaaagacaaaattgacaaatgggatctaattaaactaaagagcttctgcatagcaaaagaaactaccatcagagtgaacaggcaacctacaaaatgggagaaaattttcgcacctactcatctgacaaagggctaatatccagaatctacaatgaactcaaacaaatttacaagaaaaaaacaaacaacaccatcaaaaagtgggcaaaggatatgaacagacacttctcaaaagaagacatttatgcagccaaaagacacatgagaaaatgctcatcatcactggacatcagagaaatgcgaatcaaaaccacaatgatataccatctcacaccagttagaatggcaatcattaaaaagtcaggaaacaacaggtgctggagaggatgtggagaaataggaacacttttacactgttggtgggactgtaaactagttcaaccattgtggaagtcagtgtggcgattcctcagggatctagaactagaaagaccatttgacccagccatcccattactgggtatatacccaaaggactataaatcatgctgctataaagacacatgcacacgtatgtttattgtggcactattcacaatagcaaagacttggaaccaacccaaatgtccaacaatgatagactggattaagaaaatgtggcacatatacaccatggaatattatgcagccataaaaaatgatgagttcatgtcctttgtagggacatggatgaaattggaaatcatcattctcagtaaactatcacaaggacaaaaaaccaaacaccacatgttctcactcatagatgggaattgaacaatgagaacacatggacacaggaaggggaacatcacactctggggactgttgtggggtggggggaagggggagggatagcattaggagatatacctaatgctaaatgacgagttaatgggtgcagcacaccagcatggtacatgtatacatatgtaactaacctgcacattgtgcacatgtaccctaaaacttgaagtataataataattaaaaaaatgaataagaagatatttaataacatggaaatttcataaatttaggtctccttattaattcatggctgggattactggccccagctctttgctctccctgtatgtaggctctatgctatgagactgaaaaaagaatttttttcctgccttcattgatggactacacctcccaaatctttacctttgggattgatcttatgactttctctggccaagtatacacagatgggcaggagggaaagtatgccagttccaaacctaggccttcacaggctcacacatttttgtttgctcttttgtgccgctgtcattgctttgaaaagcatgttctccaggtagcagctgtcccttcatcctgaacctcagaataaaacaaatgaagcagacttgagccacctggactctcagcttgaagcagagataccccaagtgactcacagatatatgagctacataaatgcttattgtatacatctaagatctttctagttatttgttacataacaatagctaaccaatgcacaaaccaaaagttagaaatatatactgaagcaagttgcacaattctgcctgattccttcgagctataagacctacttacacacaatagagcctgccccagtttttaaataataaccattataataataatcatgatggttaattttgtgtgtcaacttgcctgggctaaggaatgccctgatagctggtaaaatattacttctgctgtgtctgtaagaatgttttcagtagactgagtaaagattttccctcaccaatgtggacaagcatcagtgaattttttctctcttcttgagctaggatatccatcttctactgccctcaggcattacagtccgtggttctcagaccttcagactcagaccaggacttataccattttcccccccggttctaggtttgagactcagacttaattacaacattggctttcctggttctccagcttgcagacagcagatggtgggacttcctggctgcataatcaagtgagccaatgtctgtaatgaatcttcatatatatttattatatatgtttttttctattaactctatttctctgaaaaatccttactaacactgttattattattacaggcttctgatattcatgcatggtttgttgtcttagagtactcaagggcaaagcccaggtcaaagctagagaacagtgctaatatcagataatagatgcaaaggaaatttgtaaatagaccacaaagtacctgagttccctagcttcttgctttgtgttctatttacagacttctgccttctgcagtcctgggtaaagacctttgctgtccaactcagccagacattccttgacataggctttatttttctcctttccacccttgactcataccctagctgtggatgctccagcctggcaaatgggtcctaggcaaattgagcagaaagagcccctcaatactggcagagtaggccacttttttcacatcattctaatgaggttgttaacacttccttctccccaggatgttatttattctccttcctcaaaactttgtgctctaaccccatggtattagaactccagcacagatttgcatccagagccagtgaataagtcactgaacctcttgtcggtccttatctccagtcttttctctcaagctgcaatgagaaagtgtatgctctgccttggcaaactcttgaagctctttggttttaaaatcttaaaaggtactcttgagagcttgagcagcaatggcaatagatagcacattaatagtctggcagaagtgctgtcttcctgacattcagcagctcttgagaaggcttcatttgcatactggcatggtcacaggactaagccctgcaaatagagagtctagcatctgtcaaaataagaaagcagtttagagtacctgataggaatctgagaaggatgctcaatttggaatcacacactgacacatgtggctttcaactcagagcaacccactttttctcgtgaatcagaaaggatgtaaaatttactaaaaacctacaatgtgcctggcgaagtacttggggtttaattgcattgtctcatttaatccttacacagctctgcaaggtcagtaccttttttttccttttataaatgaggaaatggaggctcaaagagattaaatgacttgctcaaggtcatgtggctagttaaaatgagaatgcaactttgaacctggatctattccactgcattcttagaacccaaaagatgaatgtgactttagaagaacttaaacaggacataagaaagatatcaatgacaggtatttttcaaacacccacaattgctttatttgaatagtaaaggcagggtacaaatctgtccctacaatccaaggtcaactttgcagtttctgtcagtcataggtgccatagttaggaatgctatgttgaatgaacttatgtccagcagaaacagagagtcctctccctgtaggtttctggaatccctcaggtcatgctgtaaccgcccaaaattaacactgttgttaccacacagacagatgacactgtcaggatgatgtgagggaaaacagagggcaattgtggagtctcaccaagacataactaaacaccaccaacaaaatcttatactcatgtgcattctgtctctctggattttatttttttcattcaccgctgatcagaaggcaagtctctctggatttcaacctagacaagggctactctatgaagctcaatatgattttgaaatgaattgggatttcaatataagcaatatttgcaagtattgtgtgcccatcactgggctcgagctttcacctatcttgtctcatttctaccaatcctgtaagagagccatgattattgtctgagatgttaagtatcttgcacagtgccacacagataagagtggcaagctgaattttaactcagctctcttgaagagtagttcagagttcttagtcccaaactggtgacctacgttatagtcacttagatttttttttataactataaagtagtcagagtcccacaatgttttgaaaaagtatagtatcactggaagaaagatgcaacctccaaaggcgggaacattgtgtgataactagactgtatctaaaggcataatctatatctaattcttctaaataaatattcttaaatgaatgaatttttgagagaaacaaaaatatcttattctaacagcattgcctactttgcagcactcagtgtgggtttataaagcccttcctttgtgaagcagtaccacttcatatatcagtcaaataatcagccctaaagattcctaaatccatgaaaaaatattctaggttttagaagagttgtattttaatttcctttaggagagcacattcctaggagttcttagaggtgtgccattaatgttctatccccactttaaaacgccaatggaaatgctatgttttcttgaaaatggccatatagaccaacagatatatcaagctcattttagctagaattatactaactcattgattataagtgctgataggaagccatggtcagcatgcagaaagatagaggcatgggtgcacactaaaataggaaagctagttattacttattaatatatattttgcaataagacatggtttgatgaaaaaggaaactattaaaaacaaaacttaaacaaaaaattaagataattcacaaaaaagaaatttaaaaagctaacattaccaataatcagagaaatgcaagtaaaaatgataagatgccacttaatacccatcacattagtagaagttagaaggtcaaataataccaagtattggtaaggttgtgcagaaatggaaagcttcctgcaccgctactgaaactgtgagcctgtgcagccattttagaaatcaatctaaaataaaataaatctggttgtagatagtgaagataagagtgtgtgtccttgaaatcccagcactcctactcctgtatgtattccctaaagaaatccttgtccaggtccaaaaggactcaaggctattcatcaaatttctgtttgtggaagcagggaagtggaggcagcctgacttatccatcactaaggaaatggaaaaataaaatgtagattcaaactgtgaaaaaccctgctggaattagaagcaatgaactagttgtgaatagaaaaacatggctaagtctcaaaaagttagtgttgagtaataaaaatcaaaatcagaataaaggctgtaatgcaacaccatatgtgccaacttaaaaaatgcacacacatgctatattttccaagaatccatacatactcaaggatatatatctgacatattagttagggtgcatggggagatagagggctgtggataccgggagggaatgaggataaggcatgaaagaggaaataaaaataaaacaaaagagggaactgtaatgatagtgttccatgaactgagaagaatgtcaattgcaactctatgcccatgagacccaaataaataaagtgtacattgtatgggatggggggaagaagtataataaggagagagaaaccattgagatgaataattatggtcagctcttgcagtcaagatgttgtcattgtcggttgaatgaaatctttagggttacaggaagcattgatagtgtgtcatttagcccttttcatctgtcactgctaaagggctcaaaggcacaccaggtgcccagtgggacccagtacaaagtactgttatggttacatctgaatttgtaacccaatttagtataaaatttagtatggctttgcgataaacagaaaggagaaagagaaaccctggcttgtcctgtgaaggaaagcacagcatttctccttggccatcagtgccaacccattgctctatctttgccaccaaagttgaaaactgtttagcagtgtctctgttgtggcttccaaattatccctagaatagattaagaaattctaggaaatatcaagtcaggaagagacacaggtcctcagaaacataattggagataattcgcttcctagatcagcatccagactgtagactcctctttgtcttaataaacaaacaaggaagtaaataaagaaatcagaagcagttacatttgctgccagagagcactaaaaaataataataatttcaagacgcaagaaatattttatagaacaagagacaaaacaacaatagaggaattttgttgaggtgtgcaaactgttatttaaatacacatcagctgaagagtctatcacaaagagtatagagagtacaagaagattaagaaatatattacaacaagaacttcagaggttaaataattactagcatcaaatttcatatttaaaataaaactccagacattcatttagttgaaacatacagttaaatggcggccaaaagaaaatctaattgctatggatagaacatttgcaaatgtcatatgagaaagtcattttttcaggcaacatattatacatttttaaatatcaaaaaaatgaggtctggagttaaacaaaattaaatcaaatgaaaattcagggtcagtgcttaaaactattgtcgaatgttaaatatctaggaaagtttcaaaatttctgggattcaaagggtggggaagataaataatttctaaataatccagaagtttaggggatcctatactacatatgtgactttatgaagtattatttttataactggaaacttccttcttaaactactcccatccccaaaaccccaccaacaccaccttagccttgtctcatgtaactatatcaaatattcagaaatattttatactcttttctgatatatttttagcctttagacagcagtgggttctaacactttgcaatcaatcttctctagcccccttctagcaaaatttcaatgtgatataatatgtgattattatgcctttccaattctctaggtaaactagaagtgaaatgaaatcaaagtgaattctgcactactgaagggggagggaggatttcctgtgccttcagttagtttagaatctaattgggaagaattgaggtaaaagggcaatatactacagagttttaaataatatgacagcaataattacagtattatattgggaatatacttgggaagaggggaaaataaggtcagagatagctgccaagaggaaatgatgtctcagccgaaaccagaaaggcatgcaagaggtaggcaaggaaagaacaataaacactgagtcatgatctcaactttctacatctaaatgtttcaatatcctggaatgtctaagtttgacataaatataagtggaattttataacagcaggccaataacttgaaagtgttaatgctgcacatctacttaaccaatgccaggagacctccacacagtttatttcatagccccttaagtgatgccatatgggccatcactgatttttagaatcacccttctggaaatctcactttgctttgctctaagaagctatagtgggtacctgttccctgcacccacagcctcttccttcctctagaatctagaaaagataatgtcagcaattatattattttctctatccaccatttcagacacagccttatttcataaaagaaagtatacttgataaaaatattcaaaaactgagttgtggtggtattggtacattttctatcaatttactaaaactacttattgtactcttacaatgaataaattttgacattatgtaaattatacctcaataaagtgcacctaaatgttgaacttttaaatttatatattatttatttttcaaaatcttagggccctgcattttttatgcatttctatatacattatttatttatagaggcatcagccacacttctgtttcctggttcctaccccaacctctgtgacctcagcaagcagcatagcctctctgaaactcaatttcctcacatttataaatgagcttttatattatttacaaacctacctcatagagcaggttgcaggctacatgagaaggtgcaagttcaatgccaagcagggtcctagtatttaataaaagctcaataaatattcattttcttctttccttctcttacttgaagtataacatttgataatgaattttctcattgcaacaataacaccccttccactgagggatttgtatccctgcttaagaagctattagtattctacagcagcgactcaccccacacaatcttggcagaatacatccctctacctctctggtcaataacctgcctggcctgtgaccccaggcttcctgagaagcaccaagtcctcccagctttcccccttgccagtggccttctgaaagtgataccattccgtttgcgtctttcatttaagagacaaaagctggtcccaggccacagcaggctttcaaaagcacctccaggattcttaataggtcatgagagagagaactgccacccagaaaagatagaatcaactagcctgcttcttttctggtggcacacagagttcatcagcaaccccggactgtgtagttaatgcctcacccagggaacaagggagaattaagatgtctggaatgagaagcagctgagaatgggaagctttgtccctggagccaattgtagcttagactcaacctgctaatgtgtatttctctctccatgactcattttgggtaaatgctaacaaggactagtcactctcctcctctcagcagcctcaggagggactgggatcatgactgcagcctcaagctatgcaagcagctcaaagctaccctctctctgtgtggattaaatgtaggcaaagtttctcccttcaggatgaatctttggtttcttctctttaaccttctaggtctgcaacccccttgccctcctggtctggtaactctactcctgagaccttctgaaagccagtgtgctttccagggagactgatgtttcacatcactgttttctctccctcttccccgtcactgacagtggtccaatgcccgcaattccactgaaggactttcattcctttagcctaaggattccactctcaaaacataactgtcctcatttaataatatatgttaatattcttaaaaccttcaatttatcacccccactgtaagaatttagtctgacaaaccagaaacatgcaaaaagatttctgtacaaagatgcttattgcagtattgttcataatatcaaaaaatgaaaccaatataactgccccaaaattaaaatatgaaataaattatggtataactataaagcaatattaaaaatcgtgtttgcagatcatatgctgatagttaataaaaagagcaggaaaaacctacatagtgagtctgatcaaaacaatgaacaggtacagctcccagcctgagcgacgcagaagatgggtgatttctgcatttccatctgaggtactgggttcatctcactagggagtgccagacagtgggcgcaggtcagtgggtgcgcgcaccgtgcgcaggccaaagcagggtgagacattgcctccctcgggaagcgcaaggggtcagggagttccctttcctaatcaaagaaaggggtgacggacggcacctggaaaatcgggtcactcccacccgaatactgcgcttttccgatgggcttaaaggtgcaccacgagattatatcccgcacctggctcggagggtcctacgcccaccgagtctcgctgattgctagcacagcagtctgagatcaaactgcaaggcggcagcgaggctgggggaggggcgcccaccattgcccaggcttgtttaggtaaacaaagcagcagggaagctcgaactgggtggagcccaccacagctcaaggaggcctgcctgcctctgtaggctccacctctgggggaagggtacagacaaacaaaaagacagcagtaacctctgcagacttaaatgtccatgtctgacagctttgaagagagcagtggttctcccagtatgcacctggagatctgagaacgggcagactgcctcctcaagtgggtccctgacccctgacccccaagcagcctaactgggaggcaccctccagcaggggcacactgacacctcacactgcagggtactccaacagacttgcagctgagggtcctgtctgttagaaggaacactaacaaacagaaaggacatccacaccataaacccatctgtacatcaccatcatcaaagaccaaaagtagataaaaccacaaagatggggaaaaaacagaacagaaaaactggaaactctaaaaatcagagtgcctctcctcctccaaaggaacgcagctcctcaccagcaagggaacaaagctggacggagaatgactttgacgagctgagagaagaaggcttcagacgatcaaattactctgagctacgggaggacattcaaaccaaaggcaaagaagttgaaaactttgaaaaaaaattagaagaatgtataactagaataaccaatacatagaagtgcttaaaggagctgatggagctgaaaaccaaggctcgagaactacgtgaagaatgcagaagcctcaggagccgatgcgatcaactggaagaaagggtatcagcgatggaagatgaaatgaatgaaatgaagcgagaaggaaagtttagagaaaaaagaataaaaagaaatgagcaaagcctccaagaaatatgggactatgtgaaaagaccaaatctacgtctgattggtgtacctgaaagtgatggggagaatggaaccaagttggaaaacactctgcaggatattatccaggagaatttccccaatctagcaaggcaggccaacgttcggattcaggaaatacagagaactccacaaagatactcctcgagaagagcaactccaagacacataattgtcagattcaccaaagttgaaatgaaggaaaaaatgttaagggcagccagagagaaaggtcgggttaccctcaaaaggaagcccatcagactaacagcggatctctcggcagaaaccctacaagccagaagagagtgggggccaatattcaacattcttaaagaaaagaattttcaaccaagaatctcatatccagccaaactaagcttcataagtgaaggagaaataaaatactttacagacaagcaaatgctgagagattttgtcaccaccaggcctgccctaaaagagctcctgaaggaagtgctaaacatggaaaggaacaaccggtaccagccgctgcaaaatcatgccaaaatgtaaagaccatcgagactaggaagaaactacatcaactaacgagcaaaataaccagctaacatcataatgacaggatcaaattcacacataacactattaactttaaatgtaaatggactaaatgttccaattaaaagacacagactggcaaattggataaagagtcaagacccatcagtgtgctgtattcaggaaatccatctcacgtgcagagacacacataggctcaaaataaaaggatggaggaagatctaccaagcaaatggaaaacaaaaaaaggcaggggttgcaatcctagtctctgataaaacagactttaaaccaacaaagatcaaaagagaccaagaaggccattacataatggtaaagggatcaattcaacaagaagagctaactatcctaaatatatatgcacccaatacaggagcacccagattcataaagcaagtcctgagtgacttacaaagagacttagactcccacacattaataatgggagactttaacaccccactgtcaacattagacagatcaacgagacagaaagtcaacaaggatacccaggaattgaactcagctctgcaccaagcggacctaatagacatctacagaactctccaccccaaatcaacagaatatacatttttttcagcaccacaccacacctattccaaaattgaccacatacttgaaagtaaagctcccctcagcagatgtaaaagaacagaaactataacaaactatctctcagaccacagtgcaatcaaactagaactcaggattaagaatctcactcaaaaccgctcaactacatggaaactgaacaacctgctcctgagtgactattgggtacataacgaaatgaaggcagaaataaagatgttccttgaaaccaacgagaacaaagacacaacataccagaatctctgggacgcattcaaagcagtgtgtagagggaaatttatagcactaaatgcccacaagagaaagcaggaaagatccaaaattgacaccctaacatcacaattaaaagaactagaaaagcaagagcaaacacattcaaaagctaccagaaggcaagaaacaactaaaatcagagcagaactgaaggaaatagagacacaaaaaacccttcaaaaaattaatgaatccaggagctggttttttgaaaggatcaacaaaattgatagaccgctagcaagactaataaagaaaagaagagtgaagaatcaaatagacgcaataaaaaatgataaaggtgatatcaccaccgatcccaccgaaatacaaactaccatcagagaatactacaaacacctctacgcaaataagctagaaaatctagaagaaatggataaattccttgacacatacaccctcccaagactaaaccaggaagaagttgaatctctgaatagaccaataacaggatctgaaattgtggcaataatcaatagcttaccaaccaaaaagagtccaggaccagatggattcacagccgaattctaccagaggtacaaggaggaaccggtaccattccttctgaaactagtccaatcaacagaaaaagagggaatcctccctaactcattttatgaggccagcatcattctgaaaccaaagccaggcagagacacaaccaaaaaagagaattttagaccaatatccttgatgaacattgatgcaaaaatcctcaataaaatactggcaaaccaaatccagcagtacatcaaaaagctcatccaccatgatcaagtgggcttcatccctgggatgcaaggctggttcaatatacgcaaatcaataaatgtaatccagcatataaacagagccaaacacaaaaaccacatgattatctcaatagatgcagaaaaggcctttgacaaaattcaacaacccttcatgctaaaaactctcaataaattaggtattgatgggacatatttcaaaataataagagctatctatgacaaacccacagccaacatcatactgaatgggcaaaaactggaagcattccctttgaaaactggcacaagacagggatgccctctctcaccactcctattcaacatagtgttggacgttctggccagggcaatcgggcaggagaaggaaataaagggtattcaattaggaaaagaggaactcaaattgttcctgtttgcagatgacatgattgtatatctagaaaaccccatcgtctcagcccaaaatctccttaagctgataagcaacttcagcaaagtctcaggatacaaaatcaatgtgcaaaaatcacaagcattcttatacaccaataacagacagagtgccaaatcatgagtgaactcccattcacaactgcttcaaagagaataaaatacctaggaatctaacttacaagggatgtgaagggcctcttcaaggagaactacaaaccactgctcaatgaaataaaagaggacacaaacaaatggaagaacactccatgctcatgggtaggaagaatcaatatcatgaaaatggccacactgcccgaggtaatttatggattcaatgccatccccatcaagctaccaatgactttcttcacagaattggaagaaactactttaaagttcatatggaaccaaaaaagagcccgcatcgccaagtcaatcctaagccaaaagaacaaagctggaggcatcatgctacctgacttcaaactatactacaaggctacagtaaccaaaacagcatggtactggtaccaaaacacagatatagaccaatggaacagaacagagccctcagaaataacactgcatatctacaactatctgatctttgacaaacctgagaaaaacaagcaatggggaaaggattccctatttaataaatggtgctgggaaaactggctagccatatgtagaaagctgaaactggatcccttccttacaccttatacaaaaatcaattcaagatggattaaagacttaaacgtggccggacacggtggctcacgcctgtaatcccagcactttgggaggccgaggcgggcggatcacgaggtcaggagatcgagaccatcccggctaaaacggtgaaaccccgtctctactaaaaaaaaaaatacaaaaaattagccgggcgtagtggcgggcgcctgtagtcccagctacttgggaggctgaggcaggagaatggcgtgaacccgggaggcggagcttgcagtgagccgagatcccgccactgcactccagcctgggcgacagagcgagactccgtctcaaaaaaaaaaaaaaaaaaaaaaaaaaaaaaaaagacttaaacgttagacctaaaaccataaaaaccctagaagaaaacctaggcattaccattcaggacataggcatgggcaaggacttcatgtctaaaacaccaaaagcaatggcaacaaaagacaaaattgacaaatgggatctaattaaactaaagagcttctgcacagcaaaagaaactaccatcagagtgaacaggcaacctacagaatgggagaaaattttcccaacctactcatctggcaaagggctaacatccagattccacaatgaactcaaacaaatttacaagaagaaaacaaacaaccccatcaaaaagtgggcaaaggatatgaacagacacttctcaaaagaagacatttatgcagtcaaaaaacacatgagaaaatgctcatcatcactggccatcagagaaatgcaaatcaaaaccacaatgagataccatctcacaccagttagaatggcaatcattaaaaagtcaggaaacaacaggtgctggagaggatgtggagaaatgagaacacttttacactgttggtgggactgtaaactagttcaaccattgtggaagtcagtgtggcaattcctcagggatctagaactagaaatcccatttgacccagccatcccattactgggtatatacccaaaggactataaatcatgctgctataaagacacatgcacacgtatgtttattgtggcactattcacaacagcaaagacttggaaccaacccaaatgtccaacaatgatagactggattaagaaaatgtggcacatatacaccatggaatattatgcagccataaaaaatgatgagttcatgtcctttgtagggacatggatgaaattggaaatcatcattctcagtaaactatcgcaagaacaaaaaaccaaacaccgcatattctcactcataggtgggaattgaacaatgagatcacatggacacaggaaggggaacatcacactctggggactgttgtggggtagggggaagggggagggatagcattaggagatatacctaatgctagatgacgagttagtgggtgcagcacaccagcatggcacatgtatacgtatgtaactaacctgcacattgtgcacatgtaccctaaaacttaaagtataataaaaaaaaaagttcaaacaaataaacagaaattaagttaataaggaatattaaaatgtagaaaagagattagaaagaatgagccagtttaaaagtactttcatttcctcttctattcacatgattaaaaaattaataacatttattttaaagactcctcattaatagaatttcctctcacatagtactttcactatgtcaaacaaatgagtaaaagaataacaagatatgatattgatgatttttatctatttagaggttgagaaatgacctatattacttgtactagaactgtgtgacatcagaaagcctaacttaggaatgtcattactgaaaatatattttgactaaagtttgtaatttattaagtctctcaattagatttctagtttgaaactatatgaagtcttaaaaagatatttgtttctagttatagtctatatttttataaagacctatttcaagataataagacaaataaactttggtaaaggatgctagaaggtctgagatccaatgattccatgtttggtaatatttttaggccaaaaaatcatgtacctatactttttgttaaagtatatgatgctatttaagtagtaacttaggttcaaaaacagattctattccagcaaatgttcttagttttgtggttttaattcaaactagtacaatgtggaaatttatgtaatctattttaagttcagcaagtaaataaaaacaactatttgtccccttgctttctaaaaaaaaaaaaaaaacaaaacaaaaaaaaaaaaacaatgaacacacacctacacaccccacacaatattacacatagagaaaattctggttgaaaagtgttttgaaatatggacagtgtttttcttcagatggtgggactatgagtgactttttacatttttttctattgttctacttatttcttccttactgtgcatatgttactttcctagttaaaataaaagacttttaaaaataaacgggcactttgggaggctgaggcaggcgaaccacgaggtcaggagatcaagactatcctggccaacatggtgaaaccccatctctactaaagatactaaaaaaaaagttagctgggtgtggcggcacacacctgtagtcccagctactcgggaggctgagacaagagaattgcttgaacccaggaggtggaggctgcagtgagctgagatcgtgccactgcactccagcctgggcgacagagcaagactctgtctcaaaaataaataaataaataaatagggccaggtacagtggctcatgcctgtaatcccagcatttggggaggctgaggcgggtggatcacgaggtcaggagtttgagaccagcctggccaatatggtgaaagcctgtctctactaaaaacacaaaaattagccaggtgtgtggtggcgatgcctatagtcccaactactcgggaggctgaggcaggagaattgcttgaacctgggaggcagatgttgtagtgagccgagattgtgccactgcactccagcctgggagacagagcaagactccatctcaaaaataaaataaaataaaataaaataaaataaaatagatgaaaattccacaatctacaaaatatctagaaaaggtaacatttcattatctcattcttacaatgggcctctgggagtatcatctatcatttacattcaaggtgcatcagtttcaaatctgctagaggaacaattattgatggagagagaagacttagagcattgagtattgattattgaaagagaaggaggaggtatgatgtgggtggtctggggggtgaggctggagacaaatttgtaaaacccactaccctccactcatattgccccttctcagaaacctgcaaaccccaacagagtgatgagcagactgcatacagggaaggcagtgtcatgcaatgtagtatagtgagaagaacagtgaatgagtagttaccatcccttttagtctagtgagagagatagacattaaacaaacatacaaataaatcatatttacaagttgtgataaatgttacaacagggtttctcagcctcagcacaattgacattatgggtcaggtaatcctttgatgtgaggggccagtctgtgcattgtagggtgtttagcagcatctctctacctgctacatgccagtagtacccgccctctgtcaagttgtgaccactagaaatatcttcagacattgccatatgtcctttggggtcaaaattccccctctccacttcatgttgagaaccactgctgtgaaggagaaaagaagaggagtctctgagactgctgaataaaagggccaaatttaggcttcaagttcagggaaaatctgttcgaggagtaagtcctgaagttgagacacaaaacatgcttaggatatcgtttagcaaataggaggaagagtgttctggcaggaatcagagcccatgcaaattccctgagcctggagttctagaggaattagaagtccagtgcagctggagtatgatgtgagagatgagactggaagggggaggctgttcatgtggtctgtaaaataggacaggttgagatatctgggttcccctgtggatccacccacttgctgtatgcaaacattctttttctcatcttcattttgtctctgtgtttcactatctccacaagaaattacagaaattgaaagggacagtgtgaagtgacaaagactgcaagctctgcctcaaaatccaagttttcctcttcttcttgagcaaacagccaaatacagtggaccagcctcctctgcagtaggtgtggccaaatggctgagttctggccaaaggaatgggagtggaagtgatgtgcacaaatccacgcccagcctgtgagatactgccaagcatgatcttcctttccctggtcttttctctggttagatgccagtgatcaggggaaatgatgggaagaacatactgaagatggcagctcctcgatcagcctggtccttcagtgactgcacatactgcatggagcagacacccattcatgcactcaccaccccatcaggaatagccacattggatggttacataagatagaaataaacttctatttgtattaaaccctaaaatgtggaggtttatttattagtggagcttgtattatcctaacaaataaaagcaagatctcaggaaacagctctctctggatggaggacatgtttcccttagccagctgcttaatgccaaaaagcaaaacatctttcagccatattgaggagctgtggaacaaactcctggacagctcaaaccataaaaagggtagttttagctttaagtttttaatgtgtagaatataatgaaaatgaacagaaaagttctttcttcttttcaaaatagcatgcggagaatttatattgcaaacattttaacattgtcactagtcaaaagagaaaatcccctgacaatacaaagttctaaaaccaaacatggcatagctaataaattctgaaactttctgaaaaactacaactactattatcaatttgaaaattaattgatattccttctctaaaggtcttttatatcttgcatatccttcttttttctaccacttttccatctaagtttatgaatccaaatgtcagtggctagaaatgatttccacttttcagcaatcacacacttagcaatcaaccaagcaagatgaacaatccgctgtatatttattcaaatgtacaactctaaatctgcataaaatataaggagtggaatgtaaagaggttgtcccagggagaaattatagaagcataagccagaacagatatgctttcagcttcaagtataagaaaatctgactttccatgggcttaagatatggagcgggatatttttatcactaaataataaatctgatattaagttataataatgtatttaagattacaaaatagtatatatgtatatgtgtgtatatatgtatacacagatgcatgtagttatatgtataatactgaaacagaagttcaatgaaacaaaatataccagatgcaatgtattctgatatttcctattctgttttatttagtttcatttttaaaagctatcagtgacaaccaaaccaattgaaaaatgggcaaaatatctgaacagacacttcacaacagaagatatacaaatggtcaattaacacattaaaatatatttatcagagaaatgcaaataaaatgagataccactaatccatactagagtggctaaaatttaaaactgacaattctaagttttggagacaatgtggagcaattggaactcatgtacattgcagatgagaaagtaaaattttggaaaacagtttggcagctttttattaaattaaatttacactaaccataagacccagccattcatagaatttatccaagaaatataaacatatgttctcataaagtcttgcacataaatgttcattgcaatgttactcataatcccccccaaagatggaaacgaccatcgcctacccttaacaggtgtctagataaacaaattgtgtgtactctaacaaaaatatactactcagcaacagaaaggaactattgattcacacacatggatgaacctcacagacattataatgagtgaaagaagatgcaaatagtatatactgtatgatcccatttatataattttacatgtaagagaaactattcttaatgacctaaatagatatccatagtgcctgggatctggaggagaggactgcctataaaggggctcaagggaactttttacagtgatggaaatattctcttagttacatgggtctccacatttgtcaaaactcatgaactgtacacattagaatgggtcaagtagttttgggtccaccaataggtaatgatttaccatttgaaaaagcacaaatttgttactcaactatcacagggctttctagaatccaaattgttggtataataatcccataggctatcatgttactcatgattagattaaatatggcatgacaattaattatgagacctggtacccaacacttccaattagcacaggctttcaaaaatctttcatccttcctaatcttatgactaataaagtactttagtaaaaatcgctgtactgtttagagagaactttctctttcattttatgtgacctaagcaatagccaagcaaggcatttatttttattcctcttttacagttgagtaattaaagtttagagtcatagaactagtaaatacagaggtggactaaaatgcatttgtatctgagtctgtttcccgttacatcacagataactttcagagcacagaatcatgggatattgacttttggttttaatttctttgttattaggacatccaagaagcagaagacatattaggtacatcttatttgctttcaaaaaatagagtttagttctatggctatcattccaacccacagatctatactttatgggttctataagatcaaatggaagtcacctaacaacgcagctttaaaaaaagatgtcctttacctaagcatttccatttttcttcctccaaagagttgaatcctctttcctcaatagatttggctagttaatcaaaaagaagaaaccatctgaagagggaaatctatgacctcttcgtcaaggaaagtcagattattcaatgccaagaaaggctatttttactttcatctgatagtctgtgggatttttttaaaggtcaacaccatggaagtaaaagaagcaacatttaagaggagctcccataaatctccctcctcttaacagcctcaaggttgaccctgtgttattggtggccagttggcttgggtagttggaactttgttatataacaaggacaagggagtagctctatccctggggatgtcactaaagtagcttcaacatgttttagagccactcaacccaccattgacaccagcagccacaatgtgagcccccaaaatgtaggtggatctcccttaattcacactggttctggaagaacaagtcagcagcatcctttgggcagagaaacaaaggtagagtatttgtagttcactttaaccttagagcataaccatgagggccatgttttaggtaagaaggacaggacatatttagtcaacataatggaatcactctaagctgtagcaaaggaaatcctgaaaaacccattcattaactctgtgactccaggagaaccagtttatttctctgagcatcagtttcttcatctagaaagatgagaacagtcattccctacttcaggagattgttgtgaagtttaaatgggacaaatgtggaagagctgcatgaattgtgaaaagctccataaggattcatggcctttctgttctttatcaggatctgctttttgtgagagaaaattagtttttgctcagtatctttgttgattaattcaacaaaggtttgttgagtgcctactatgtgccagacaaggggctgtgtgtaagaagtgcagaggaaacataataagatcctgaccctcatgtagggctgggaagtataactggaaagggaggctaagagtggcagatgctgtgatgtggcactctggtctccctctggtgtgaaaggtctcattcccccacatgctggaagtgctattagcctcttagagggaatgcctgggctgaagagagtcaccttgcccaaggccacaccccctttctggatatgaggaattcatatccaataactgattgacatgggcataaaaaggcccagtcctttgccctcaactgggacaaatgtgaactgtcatttctctgcagaattcctcataggtctggctgacattgggactgtatctcagctcagctttcccctctgcccaatactgctcccttctcttcctttcccttccacaaatgttggccctggagaactccttaataaacttcctacacactggtatctatctcagagcctacttctatgacacttaattttatgtgtcaatttggctaggttatggtacccagttttgggtcaagcaccagtctaaatgttgctgtgaaggtatttttaaaatgtgattaacatttaaattggtagaatttgaataaagcagattatcctccataatatgaggggttcatccaaccagttgaaggctttacaaaaaaagactgaggtttcccaaggaagaaagaattctacctctagattgccttcagcttcaagactgaaaaatcaaaacttccctgggtctccagcctgttggcctgccctgtagattttggacttgcaagccccggcacccataatcacataagcccattccttggggaaaaaaatctaccaccgccccccaacccctgctctctgtctgtctgtctgtctgtctgtctctctctctctctctctctctctctgtgtgtgtgtgtgtgtgtgtgtgtgtgtgtgtgtgtgtcctatttgttgtttaactggagaatcttgactaatgcaactttaatgcaacttccaaacaactcaacggtgacatctgacatttatgatacagtgataaatgatctgagttagcaccagggctggtgtcagaggtatgccacctgtgcagtcaaaaagggccccacactcagaaggaccctggttatatgctctgcagttattgtcttgaaaatcttagtaattttatcttcaaacttgcattttataaaagagcatgtgtttgatcagaggagatacatgtgacatgcatgttcactgtttcttgccaaacaatttgcagttagcatttgcaatgccctgtaaccaaataattccagtggacccacagtgcacgagagctcaatgaggctcaaagtgaccaaatagttccactagacccacagtgcatgagagctcaatgaggctcaaagtgaccaaataattccattggaccacagtgcgtgagagctcaatgagactcaaagtgagtacaagaaaagagagttacttctacatgtgctttagaggggagagggacagctgacagcccaagaggccacacttaaggctcaaaccagaacttgtttcaaacacagaaggaatgcaatgatattctagcaaacatgtatgaccaagaaacactattatattcttttttaaaagtttgtatcacttccccatattagccaaccacttatgctaaaaatgatgacacagaaagaaaggaaaatagagggcaactcatagttcctttttgtttcattccttccttattcatcagtaagctgaaggtagaaagtactggtggaaatagcaaagacttggaaccaacccaaatgcccatcagtgatagactggataaagaaaatgtggcacatatacaccatggaatactatacagccataaaaaatggatgagttcatgtcctttgcagggacatggatgaagctagaaaccatcattctcatcaaactaacacaggaacagaaaaccaaacaccgcatgttctcactcataagtgggatttgaacaataagaacacatggacacagggaggggaacatcacacaccagagcctgttgggggcagtggctaggagagagatagcattaggagaaatatctaatgtaaatgacgggctgatgggtgcagcaaactaccatagcacgtgtatacttatgtaacaaacctgcacgttctgcacatgtatcccagaacttaaagtataacaaaaaaaaaagttcaaaaaaagtattggtgaaatatttatcaagaaatgaaatttagaaatgttaagttagttttgtgtatatttttcactgggaagaacaaaatattgcatgtacaagctatgaaacaagaattctataatttcactgattctacatgtgagatcaatgctcttaattaaactgtcatttcacaatatagaggtgaatggtaaaatttatgctaaccattcaaaattatattttttctttacttgggatgacattaaatagaaaataaatagcaaatagcaaataaatacacaagtcaagagagagatcatggaagaaaagataaagctttgtattgtagtatctttaatagacttttttcctactttttgaacaagggtctgctattttatttcacactagctcctgaaagttatgtaaccatacctggttagcaacgtgtcttatgggtacatagagttgggtttgatgaatgcttctcaaaagctaagtcccaagagactgttcagactagctgaggaaagtatagttgagagaagtaacgaagagattccaggtagaaggaacaggacctattaagtcttctggcttagagagagcatgtttcctacagaacacaagataccatttggcttagttggatcttacatcagggcatttggagtcaggggatgtgaaaggagatgagtctgaacagtgttgtcctgtgagtcctgcactatctaatcttctggccactgactttcctttcactcaaatgttataatccaagttattctttaaagtaaagatcaaatgtaatctcctccttgaaacttccaggatcattttttaaagtgtaaagacaattcacaggagaaagaatagtcttgccaacaaatggtactggaattattggatatgctaggaaaataaattttaatccatactttttactatacataagaattaattaaaatgaatcctgaacctaaatggaaaatataacatgatacaaattataaaataagacagagcagaaaatcttcatgattttgaattaggcaaagatatcttagatatgatactaaaagtatgattcataaaagaaaaaaggtgataaattaaacgttattaaaattaaaatgcttcctcttcaaaggacacaattaagagaataaaatacaagccatagactggtagacatatttgcaaagtatgtatctgataaagaacttgaacccaaatatataacaattaaaagtaaatagtaaaaaaaaattaatgggcaaaagatttgaacagacaattcatcaaagaagatacatggatgtcaaataagcacatagaaagatgtccagcataattcatcattataaaaccgaaaataagtatcacaatgaaataacagcatgtatgtattagaatggctaaaattttaaaagctgatgataccaaatgttggtgaggatatcgaggaactcattcattgctaatgggactgtaaaatggtatcatcactttcagattttgttttgttttgagatggagtcactatgttgtccaggctggagtgcggtggcacaatctcggctcactgcaacctccacctcctgggttcaagtgattctcctgtctcagcctcccaagtagctgggattacaggcgcctgccaccacgccgggctgatttttgtatttttagtagagacggggtttcaccatgttggccaggctggtctcgaactgctgacttcaggtgatccacccaagttggcctcccaaaatgctggaattacaggcataaaccactgcgcccggccagtatcatcactttggaagacagttcggcagtttcttaaaaagttaaatgtacacttaatatatgattcagttattccactccagtatttacacaagagaaaagaaagcatacatccccacaaagacttgtgctgaaatattcatagcaactttatttttaatagccaaaagctggaaacaatgcaaatgttcaccagtagataaatgtacaaacacactttgccatattcatacaatggaatactactcatcaataaaaaagaaatgagccagacacatgaaacaacatggatgaatctcaaaataattacgcttggtgaaataaatcagacgttaaaaagagtacacactgtatgattccatttatataaacctctttaaaatgtaagctaatttacagtgacagaaagcagatagcagttgcctgcagacagggagaagggggatatagaagaggagagaccatggggagttgccagagaaagagattacaaaggggtatgaaaaaacgtgagggggagggtaacaaatatgttcattatcttgactgttgatggtttcacgattgtgtgtgtgtcaaaacttttctaattgtacactttaaatatgtgcaagttattgtatattgattatacatcaataaagcttttttaaaaatcatcatctggagatccattacactattttgtccatttttatatgtgtttaaaatattccagaataaaaggttgaaaagaaacatttttgtctttttggtgcaatataatcagaatcatggaagtagaagtggcctcaaaatgacattatatcaattcctttccctcactgggaaggtccacaagtgatttcaatgtttgtgcatgttataacctaggctatgttgctagagttttcagaagcatgctgggcttgcacaaatttaatttgacccctaaaatgaaattcttctattctcccccactctcactgctcgttgcatcagggcaataaccaaatctgttcatcgctgctggcagttaacatctcgctgtagattctaactcccatgagaacaaacagagtgcagagaaaagcaatgtaaatgtaaaacacatatttgattgctcaatcagctgctttctccctggtagctgtggctgatttgaagtcaggcaggggctgaaatgacaatcagacctgattttcatctgagctccactgttaactagtagacaaccttgggcaagtcacttcccctctctacaagagactcggttcctttctcgcaataaaaggggcttggtctttaaactgtaaggtttcttaaaggaccaaatatttacaacttgtcttcttctgttttctatatcctcaaagaataataaattgcaggctgagactcatcaaggattttacaatgtgggcaccaggctgtgactggtaaggattgggaggagaatttttctgagttggatgagttttatctgggttataatgtcaagttcactgtatgtgaggttggaatatgcatcttggtcagggatgatttgttgaaaaggatagaattccatttgtacttctcaagtaaatgggaaattttctggaaactgcagggatgtcttagaactaaagtggatgaagcacagcaggtatcataagaggctgaaaccagagaccacaaaatcatgagcaatgtcactcacttcagcttcctcacttttgtgctcttgcattttctctcatccatgtgattgcttgctctctttctctctctctctctctctcacacacacacacacatacacacacacacacaaccactaactctgtcttcacaaagtccttactcctgtctttctgcaaagcagccttctagcatcagtagcatatggtaggaaacggctccacacatctccctctgcaacagtgagccacacctagttagcctctcattggcaattccagattccctagtacaaattgatgcactggtagggggtggggaggtgggtcaagaggcacatagatctgctctcaccagggccagaggcttttagaagtacagcatgacatgattggtataaagacctccttgggtggggtttgggaatctagcttaatgcccaaggagcaagtttctttccatagtaagagcagtgatcttaatatcttaaacccctaaaaccttataattgaggagcttaggttcagctagttgtggcagagctggatctggaattctggctactcaatctccagcccagcattctcttttagaatgagttgtcagaggtttcttctcatgtccaggatgatgccaatgtggtaatagtctagtgccaggaaggttgctggttatgatgacaccagacattgaatcattaaaaaaggaataggcctttgtgataggctgtgtttaggctgcgttttccaaagacggccacaccatccttcatcccatgtgtaacccacatatttctccaatgagtggtggggtctacgtcccttccacttaaagcttggcagaattctgtggcttcctcaatcaatagagcagaagtgatgctatgtgaattttgagcctagattagcaaattcccttcatattcaccatgttctgttggtacacttgctcttagaacctagcccaaactaggcccaatggagaggccatatgtaggtgtttaagctcagagctcagctgaggtgtcagccaacagccaggatcaactgttaaatatatgagaggaaaaagcctccagatgattctagtccccaagccattgagaaacccccagagtttgaatgtgaggccccagaaatcaaggagccatctctgctatttcttgtctggattcctgacccacataatctgtgaatataatgaggtagttatatatgtatacatgtgccatgttggtgtgctgaacccagtaactcatcatttaacattaggtatatcaccaaatgctacccctcccccctccccccaccccacaggcacattgtgcacatgtaccctaaaacttaaagtataataaaaaaaaaagatttcaaaaataaaaaaatatgtaacaacacataaaaattctgattaaaggaaagaacaagttttactctgcacactgcagagctaataagtaaaaatatatactctcataagtaaaaactgtcatattctatgtttataatgtgtggagaattaagagtaaaagttgacgtaattaatttaaaaaaatgaggtagttatattgtgccagtgagttttggggctagtttgttatacaacaataataactagaaccacactggtaaatcattttaaatcatctatcaccaaaacctttaggtcttagagactatttttcttgggtatctttatcctatccatcattttaagaagaaagcctcccattgtattactactggttgtttgattaaaacagcaataatagcaacatatgcattaaactcaaagtcctgtatttgtgaacacttgtttcattacccattgctgtagcgaatttatagtcagtgtctgtcattttataataaggcagaataccctcatggcatatagaagcatcctaaagattgtctattccctatattttattccattcttagaatattttcttttcagttaatgctgacttttcccctaggtgtggcaaagctgagagattccaggtgtttccttctctcagtacttgagagaagcatcaattctgattttagcaatttctggaggatgttagtgtccaatcccattgggctgagaaagctggactccagcagctttcctcctcactcaatgcccaacccccacagtgataggcatggaacttccggctttggcattcattggcattcactggcattttcctgtggtcctcagccatgccttcttttcatctgtttgctccctgatatggtctgaatgtgcctcccaacattcatgtgttggaaatttaatccccaatgcagtgttgggaggtggggcctttgggaaagtatttaggtcataagggttccaccttcataaattaattaatgccactattaaaggattctgggagtgaatttgctttcacttgcccttctgccttccccatatgcagcaagaaggcccacaccagatgccagagattgatcttgaacttcccaggctccagaatggtgagaaataaatttctcatctttataaattacctagtctatggtattctgttatagcagcactaatagactgagacactctacatcacttcagtcatgttctaataattacacatcgacagagccctagtgtgtttgcagaataatgcatgatcatatctccaacatgaatatttgtcatgtgttgggcgctgtgctgagtagttgggatacaaagataaaggagatgtagggcaggtctgtaagaggctcacagtcatcacagagcttgcatctcctcctccatcagctgcctgcagggtctgctgctgtccctattcggtttcccaccctccaatcactgattttcaaggataaacaaaagcaaagcttccactaactgtgagacttgggagcatttcttaatattactgagtctccatttcttcttgtgtaaaatgggaaggatactgcctggtacataggttgtgggaaaaataaaatacaacgtaagattcagagttcaaaacttagcatataagaggaattcagcaaatgctactattctttcttgctctgactccatgctactatcccaaattactctgttttatactttaaaaccgcttttatgccccattcctctggctgcctgcccattcaattattctgggggaatttctgtgaaaaagaaaagtggcagggtaaatcataaagactataaatttcaagttcaatatgtgccatcctgatagtattttaagagtcatccaacctcaccccctcattttacagaggtaacttcatctcctgggttttttttttcctttcatttatttatctaaaccatcctcctcatacacactgtaaacccagcctctgtgtctccattttggtcagatggaaaatccctccttgaattctctccaaattctaagtccttttccaaaggagtggtttattaactggaacatacaggtacatggtgtgtgaagggaggatggcagaaggtgccacaattataaatatgggaaggaaagaggtgtagtgtgaaaaacttaatattttaataaaagaccatattttaaagtttaaggtcatctctcaaaaaaaaaaacctgtgatcattcattttcaaaaatggccacaattcttcatgtatccacatgttttgcaatataactttgcagcttctcccaccaagaggtgatgtttattttctcactccttggattttaattggttttgatgttcttctggtttcaagtctaggtctcaagggatttgcacacttctcattctcttagaaactgtcactgccatatgaacaaacctggtcttacctactgaaggacaagagaccacatagagcagagctcagttgttttaaatgaagccgccctagattggcccacaactagctaatacccaaatatgtgatcaaacccagccatgatcacctaagtggccacccaacccacagctgagcatagctgcataagcgagtccagctgagaccagaagaaacacccagccaactcatagacatgtgagcaaaaattcatgcttattgcttgcagccactatctttgagtggttttgctacaatagctaactgatacaaagcttatagaaaaataaaactgaaaaaaatcttcttagtggtggttctcaaagcagcaggtgagttacaaatgtccaaatttctggggtttaggaagaatgaggttttgatattcttcattttctttcaaaaggaatatcaactttaaaaggctgagaaacacttcttttgagttataaagcctcgcacagcctgaacgctgtgcaaaaagcctgattaaaattgagtgtattcacctttaaactgacatctgacattggaaatagttagaaaatgaagctaggactaggggaagaaacagaaagattagggtaagcatttatttgcattgccttttcacccttcccctgcttctgggaatgctgctttggatcatgtagtttaaataggagttgccagttttctaccttgcctccttggcagtaatgattgatctagaaattggcatacaaccctggcagactcacagaatcgtttcttgagattttaaacactagaaccaagcagaaaggtaaggcaatttttctcctctgttggcagaagcagagagaagtaagtgtagtgcagttattacttctggcactctcaaagaagcccatcacacgaagagaagcagagacaagaggcagcagccatcttgggggcatctgagtttctggtttcaaatcatttctggccttcccatggtttaatgacatgagcaataaatttgccttttctcctaagcaagttcaacttgctctcaaacacttgcaaccaaggagagtctgtagatgaaatcaataacagagaacatcttgcaaagcttgctttctcagtgcagctttgaggaaaaaaaatgaactggagaaagataagttacatgtggcagacatggagaagcactagtcagatctttcaagaaagcactcgctgcccaggtggaaagaatgtagttgtctaacagcctccagctgtgagcaacctcatggtctgcctccactttcagaggcacactattttaagggcagccaccaaccaatgactaagcaaggcacctcataaaagaactaggcatttccacccaatgcaggatgcctatagtgggcaattttccctccaaattctcccatttggctggcagatgctttgccagtttggcaacacactctagactctcctccatacacaatcccattcgttccttttttttttttcaaagatgttattcctcaataaagcttttttatttctcagtgtccattttgggaagccctaaatttagtgtttaatggcctttccccagcaaatttaaaataattcaaccaaaaccataaacattttcatagccatcttgtctagaataggcggaaagaaaggatcctgtctaggagccatgagcaggtagacatgacaaatatctccctctttcccctttagcccacatatcttcccatcattacatgggccacatggcaatggtgtaggcaaatcaaaaccacagattaggaaagctgtcctggtccatctgatatacctgtggtgtctgtggacttgcctccaactatctgccctcctctcctaccatagccccttcatttgcctcacctcctgcatcatctgtggagcaggatattaattagtgaaacatcagtttgaatgctgcagaccttgtacacttctcagcctctttttttttttttttttttttgcatgctttccattatatctaaccttgaagcttccaaagatgtgataggtagctggaaatgattctgagcccgattcttcattttgttttctacgggtatacttgaaaaaaattagaatgggaagaaattccagcttgttcacaccttgacttaggtagttactggcaggatgacttaccttcagtccaatagaattcctagcagagcttaatatttctccaacctgattagcatagagcacattaacctaatatgcaagaatcaaatattttaagctccacttgtttattcgaagtttcacagataccatttctttaactttactcaaattcaaagatataattgctgttttttttaatatacaatcactgtgtaaatagtctccaaagatgaacaccaaccatttctgagtctttttgccctcccctccaacctgggatggccctgggagtgctttgacccaataccatatggggaaaatgatatctgggattacttcagaggtcaggccttaagagtactggcagctcctgcttcctctccaggaacccagctgctcttctgtcaagccacatggaggagacagcagcaccattggcagccatgtgaacaagccagctcagtgattccagcccaattgagtcccccagatagctgcaacccctgccaataccacaaggagcagaacttcccagctgagtctaataacgctatgaactcaagagagataatataatggttgtttgaggatggtttgttacatggcaatagataagcaataattttcagatattcctactcaagaagtaatataaaggtatggaaaatggactctcttacacactgctggaggaagtataagttcatacaattaatttgaagggcaatttggcagtattttctagcatttgaaatctaaatgtcctataactcagcaattccacttttcagtatctattccaaaaaatcacccacacatgtgccaaggagcaggtacaaatatacttatttcagtctatttgagaaagatagagaggcagagaatatttaccaatgtagaaatggcttatatgtctaacatggaatattttgtatctgctgaaagaattaggtagatctacatgaaccaaataacacatatctccagtacattattgaacaaaaataatacattacaatactatatatagtaaaaaagcatttgtggcaaaaatacgcatggcaataccatatatttgcaattgcctatgtatctaagtgcatagaaagtctgatggaattaattatatatttaggataggatagtctatgctgtgataataagcaactctaaggtttcaacagcttaacatgatacaaggttttgcttttttatcctcacaaaacttgtgatatgggttgggtgacttactgtactctcatttttgagacatttacataatttccattatttgtcaccattagacaatactgtactgcacatacacatgagaagctaaacatctctttacacatgtatcactttaaagttttcaaacacttttcacatttatttcagtttacgctacatgaaaatcccatgtgctaaacaagccagtatatgacaggattactcaacaactgaaataagatatctccaatgtggttctcctccaaatggttacttagaggtctgggttgctaccatcatgcatgtatttacacaatctggtatgtgtggccttcagggtctctgcaccagacggagggagggatggaagggggacattggctcttaaatgccacagcctagaactagcaacatgtcattgttgctcacagtcccttgactagtacaagtcatatggcccaaaacttactacagtctcatttttgagacatttacataatttctactatttgtcaccattacagacaatactgtagtgcatgtacacacaagaagctaaacatctctttacacatgtgtatcactttgaagttttcaaacacttttcacatttattatttcagcttaagctacataaaaatcccatgtgctaaacaagctaggtatgattctccttcattttacacagagtgaaattgaggcccaaagaatcttgactaaggtttcatggctacaaaagagcagagacttaaaatgaactctgtgatgccctgagtccagttctcttttccttagggatatgccaacagatttctgccttatatgatatcatttaagatgccctcagtatgtgtgaattaaaggaacttagccagagaatagataaggattttaaggacaagaaagaaattgctgttccaggaatctgggtcagagtgattctgaaaaatgtttgttttcatgtctgtctccctaactagagtatgattttctaaacgagattaggccacatttgcctctataatcccattgtctggcacagggcctgacccatgttgagcactagataaatattcattgaaaggatggatggacggatggatggatggatggatggatggatggatggatggatggatggatggatagatgggtatgctttctatattctctatcataaagtcatagcatttaagaccatgaataaatctagaaccatgctactcaaatgtggtccttgaagcagaagtatcaacatcactgggaacttgttagaaatgaagaatctcagaccccactccagacctactaaatcagaatcttcattttaacaaaatctgaagatgaatcataagcattttaaagtttgagtaaactcacatgcaccggtcttgaattaactcctcttattgtatatataggaaagttctgtaggtcactgacaatctccaagatgcctcaagcattggatggaagtcaagctggaagcagtttcacccctctgccctcattaatctcatgcttccttacatcatagcctgttttcaacatagaagaaatgtacaataagtggagtttgcttaagttcaatacattcagtgtctgtgcagggcgggtcagggaggtagtctttaatgataaaattaacacatcatacttgtaacacaggagagttagtggcatacaggaagtagcacctcagtgttacaggtgaatcttccttttctcacctgtgatagaattccttttgatcctctgagacatccttaccaaggatggtcatggttctcatctttaccaccattgcgttcagggcagagcatgctaagaataattcaggagtatacaggaggaaaaaaaacactaatactgactcagacattttcacaaagatgacctccattaatccttatactacccaataaagcaggtattacatgcatttcacagaaagaggaaactaagctcaaacaaggtgagcaacttgtcttagtcagtctgtaaatgcagagtcttctgtcacaaagtctaagatgatctgatatcaatcctcctagactgactcaggtgaagaatattcagtgtaaataataatatccatttccccagtttaggatgatgcaatgagggcagaggtccactggatccctttgaaaaagctggcagaactgctcaattattagtctcctggccacactccagccacactcaggcacagggccctgaaagattgctctaaactcttccaactgcagatagctcttcctctgctgtagagatatggctgctctccataacatcaactcagatgattatacataacaagcatcacgacttgcccagcattatcagcacaggtgggcaagttgccaggaagccaggagcctctaaactgcatctagatctggaaaaattttgcaaactttggatcccccaaatttctgttccttgatacacaaagctggaagatgatttcaagtgagaacacatggaaatcaaggaactttatgcctccaagtagaagtgtctcatgacttgataagaaacatgatttgaaaatcaaccactgttcaaatcagaggctaaaagtaatagatttttcaacattttctaaaatcagggaactgaggaccaaagaggtaaaaggtcccaaccaaggctatgtggctggcagacggcaggaaagaattggaaccttggtccagttcatacttttcccattttgtgagatgatctttaccatgtttatacccacttagtagccctctcctcttttcttttaatgttattgccctaagtgatctcttctagtatcatggctgtgaaaatacttacatgctacaaacttcaaattcatatttctgattctgataccactctgatcatccaaagtatgtacagctaacttgacctcttcacttggacgtctaacaggcatctcaaacttaatttgcccaaaacagaactccatccacctcccctaaccaaagttgttctaccctaagtgttctttacttaaatacaccgccctccgcttggttgctcaattcaaaaatttaagagtcatgtttaatcctctttttccttcactcctcacatccaatctattagcatgcctcattggccataactctgaaaggtgtacccagtcaacccacttccatcatcaccactgctctcatcccctctcacttggagttatcctaatcagcttccttgcttcccctcctgctcacctcccacccacttcctaacacttagaatggtctttgaaagcatgcatcatcaggtcatgtcactacccacttcaagccctccaaaggcttcttggtgtgcttagaatcaatccaaatgctgaatcgtggcctataaggccccattgattcagctcctgactacctggttgacatcactgcctatcactctacctctcactgtctccacttcaaacaaatagatctcttttctgcaccttgaacatgccaacctaattccagaccatggtctttgctcttgctattctcttagctccaatgacctttctccagatctccttatgtacattccctccactcagatatacctttgcacatgtaactccctcaggaaggcctctctggccatacaattttaagttctcctccatctcctactcattctgtagcacatcactctgttttgtttactttatagcacttagtatatttattcacttgtttattgtctctgtctccagcaccatatcttctccccaaaatgctggctcatttaggtcatggatgtctctccattattgagaaaagaggttcacaaactctttctataaagggctttgcagatcatatagcctctgttgcaactactcacctctgccattgtagcatgaaagcagccaaatgatatgtaagcacatgagcatggctgtgttccaataaaacttggatgagctagatttggcctatgggccatcattttccaacctcttatctacaaaagtatttgtcatgtaaaagattctcggtaagtatgtatcaaatgcataaatgaatgaaagatctaaaaatctctgggagaaaacaccaaatactcagtaggatggttcttgtgtacatctggcaatagcttattattaacagagcctcattgtctcttatgtacttaccactataacttaatatttctattcctctgagacttaccaaaaaactgagaatatgttttgtaataagatcagattgttcagttggacccaaaggtcttgggagatatttatgaaccctactgaaggactctttctctgtttagaccagacaaggcctgaatatagaaagaatagtgtgtcccatcagtcagctgatgataataatgacccatggcttctaaaagatttttagggaattacccactaccaatgttttcatctgattctgctacccccttgaactgtattcttaacccttttccacatgaattttcccccatataaattttataaaggataaaaattattattaaacactataatttatcatgggactgcacctgcccaagacaggattactcaacaactgaaaaagatacaaacacaactggagacttgaatttaaggtaaagcattttctagtttgaaaatgggatttccaaagtcctggatagggagaggctaagatttgcccctgggagggtactacccatcttcgcccttttaagaacaacaaagtgtacaggctcttaagatcaccctcactcatagtccaggataacaaagagatgagttactgcttcccaaagaatgatttcagtctctacaactccactgaaagaagaattcagaattcattatctgtagaaacaatgctgtacttggtgcctagattttattaaaatagtgttgagatgctgaactttaggcacatcaaaggttaagaagacatttctgggcatttcaccatcactcccaagaaaactcatttcaagtagaaggagactttgagtaacaagcaaatgacctccaaataaaaacccttagggcacaatgtgttcagagaggggaggaggacacattcagatcctctaagtgagaaagaaagcagaataggaataaagtgagaaaaatcattccctaatcatttggtggctggttttgtttttttgtttttgtttttgattttgtttttgtttttttctgtcccctctgagccatggaagatactggagttaacaaaaattttataaactaaagaaagcaactttataatctaaaagaaagcaactttccctcctgtcttttgaattcttattcctgaaagaatggataatgaatcaggagatgagcaaaaacgtatcttttacaaagctctagtcttccaaaagtctctaaactcaaacgaaacctttttaaagtagttttgtaaaagctcaaggtatgccatttccagaaagttgcagatgagcaccattggcattacccaaattctgtcacacattgagcaatgaaattcaggaattggacaatgacctcttggcatatgaaagaattaaaagagggctagggcttagggcagggatctaatcggggaggatgtgctgtccaagcctccctccctcctcctttcctcgccttcaggtagatggaaagaaaggttcagtcatctgagagaatatccgattgtccttgaaatttttttccctattgacaaagcaaggcatgaatgaatattcagtctgattagatcttccacttgacaatgactgtcattacctggctaacaaaataatatacatctgtgtatgtgaaaccacaatggctgatgtttcaaattcttaatacattataatctggttggattgagtggctaacaatgccacaatcccatgaggtaaacaaaacattcatctctggatttcctcacctcagatctaagcatctcctgtccatgcagtactgaagattttgcaccatcacttctgtttttctcataaattctttatgaggctattagtctctagggtgctcttctgaaaccagaaggaaatttggctcacacacacacacaaaaaaagttgccatataaaggcaactgcaaaatatagtgggaagttggtggaggatggagtttcactgagaatgggacagcaacatgatggaaagaacatgaacttgaatttcagttctaccacttactagaaagatgcctttgaacaagtctcaatttctgaatcttcatttgttgctctgtaaaatggggtcatattatctcacaaagttgtcacaataattaaaatgagatcttgttttctaagtcacctgacatatattaagtgtgaaatcatttttctttctcattttcttttttataacgctctcataaatagtaggtgtaagagttcttcccaggatgtctcatcagaattcagagagttacctttgctgttccttccagcaagatctgcagtgtattattgcagagtcagctcgtgaagtatgcatgaactctctctaaactggtgtttttagccaagaaacaaaccacttcattgtaggtgcctgtgaatcaaaagggaaggtttccatagtacttttgcctgtgccaaatccatacatctgcatttttcaagggaaattgctgaaaagatattaagagaaaaacttccctatacagatatgtctgaaatccccaaatgccaccctaacaaaatcaatatttttatgaaattgacaaaagtttaaaaagagaattttctttctcctgcagctttccttgattcatgaattgcagcatcaaagaacttaaaccagaaaatacaccaaactgttgttgtcacattgattcatggttggttagataaaacaaataatcttagcttttagtatcaacatgtcgaaatttcaatagcagtgaaatattgtccattgttcattcatttattgattcataaaatacgtattgaatgcctaacttgggccaggcagtgttccaggtgctgggaataaaacaatgaatagacaggcaaatcattcctgcattaatggagtttaacagtctagtgaggaaagagataataaacatgtaaacgaataaataaatggtataatttcagagaataaatactatgagaaaatataacaagataacgcagttccctggaagtcagcactcagacattctgagacaatattgcttgagcagaaagctgaagaacaaaatagagtcataaaaaaattagaagataaagcggtcagccaaatggaacagcaaatgccaaggccataaggcaggagccaggtaagcatgtttaggggcaaaaagaaggctactatacctgggcaataaggtcagagaggaggtgggctgtgcatctcaaacctgattgtgaataaaaatcacctggaaatcttgttaaaatgcagaatctaatgggggtgggatgctgagattctacatttctaaaaagctaccaggtgatgctgacactgctagttcatagagctcactttgagtagcaaggacatagggccttgcacaccatgggaaaatgaatttcctgcgagttgaaatagaaggccacacttatctgatgcctttacacctagaaagcccttctcagttacacaaaggtctcattaccctttggcatttccacacacccactacaaaactaagtacttgataaatgcaccataaatgcctgcattcaatgataaggctaatgatctagatcctgctttgtggtttgcctagtattggaaagagtagcaaaaataatgatgtaatggggtgaagcaaaaagtggtgagtgaatggaaagactttagatgggctttgaatcatatttctgggttcaaattctacattaccatctacaaggtctttggcaaattgttcaacttctctgagcctttattttctcatttaaaaatagaaataatatccacttcatcagggagatgtgaaaatcacatgcaatagtaaagtggaagtttcttgcaatagtagatgctccataaatgtttattctctttttctcttctttccaaggtccacctgactgtcaacacgatgacatttgtatcaaatagcatcacgaatctgtgaattttgtagagcacaactgatttccaaattaggaattcagggcccacatccatgtgaagcaactgattattcctatagcacttgcttattgctgctttaaagaaaacctagattctagcccttattctaaactaacctgctggacaatctttggtaagtcccttgtccatctatggaccttagttcatctgttaaatgaaagagttggagtagatggtcctgcccaaccttggcatcttctgactgtgattaacttggtgagagttctgaaagtggacttgttttccagaaaacatagcagaatccttgtagctgagatatttgggtgatgagattcaaattcatgaagaagacaggatgaaacccttgtatattaaccttggccagcaaatatcctcattcctttctctccaatcccattattgcagggactagagtgccagaaatattatcttattctcactggatctttcatatttttaaaagcaactgacatcacaggaaaaacttgagaacaagacttaatggaatcaaatgtgcacttctctgttattttactttgtcacataataatgttataaccctttattttcaaaaatatctttgagatgaaaacaaatctataaaattgctagtatttttaaaacttgaaaaagtttaaggaggatgtttatggctttatatctgttctggtcttcaaccatctactcctccaatcctccctcaccccagtttagggttttttaaggtttttgtttgtctgcttggtttttattattgtttttacaattaaataaaataaaaattaaaataaccccaacagcaaatatcttcagatgctagaggattacaactcctgagaggcttaggttgaaaaaggaactaatgcatcttgtctaaaggtgtatatttgagataaatcgttttccaatgaatacttagaaataagcagagattatttcttaaaaggtcaggtgcttcatctcaacagaatgtttttccacctctttcagaggagaccacttactttcagatatatcaacaaaagtgccccttcccttagacctagccaaaatgaagaatctctttatagctttatttactctctgcctttgagagttttgctgtttgccttctttatcctgatgctttgaaggcttggagtattgaataaatggagaaaagatctaagaaccaagtaatggagacacacagttcagtttcagagagctcacggcaaccacagaacacacgatgattaagagattaaattatgtgaccaaaggtagaccctaaatcctccaaattatatatgtttcccagatccatgggtctacagagctggcaaaggagcaggtgctgcttacccaaaacattggctcctttagcatcatctgtgctctttcccagccaagggcacctataattacctcccataagctgaactctcaaccctgcctcgctccacacatacccactgctgaaaattgtattggcaattaatttgtcaggaaaatgctagggggtgtgaacactggtaattttataccatagatattcaaattaaacctcgagcctgagtattttcagtgtcaaattgtagcatagttgcagaaaaagagagaaacacaaacttcctcctgctatctcctgactagaggtgaaaaagaatgttccatgtggatgtgataaccttggctccatctctagggttgacttgggaacatgaacaacaaaacacactaattatgggtgataccttttgtgctcctctttgagtgaaaggagatggggttggtggttgttctgtatcattcctcaagtgacaagaatcattttaatgaccagtagcgtcagataccaataacttgtagaagcccactccaattctgcacctgattttcgtgagattactgtgagagtactgtgtttatagacccttggtcaattgacagccatgaaaatagcataggacaaaagagcaccagcataacaccaaacagaaagtcccccaaactatctcatgtacacaaggaaagcctctggaacactggagctgaatcaaaacaaagagcttaaagcttcagattctcctgggactattgttttaaagattcattttgttaattattttgaaagaagaaagaaaactaacattgacagcctacttcaagtcaaaaattgtgcatacattacatcatttaatctttatatcacactcattaggacccaggtgcagtgggtcatgcctataatcaaaatgatctgggaggctgaggcatggtggtacatgcctgtactcccagcaactcagcaggctgagatgggaggattgattgagcccaagagttggagatagaagtgagctatgatcaggcctttgccctcgagcctggtgacagaacgagatcatattatatatatatatatatatatgaagatgcctgctagctgctcccacagagaagaaacaaatgtgagtaaacactggctcttcaagtggatattctaagagaacacattgcgattcactaaagaagcaatgggacccacagagaacaaagaagaacaaagtgaatgattacagccactggggatccacaatgtccccacaaaccctttgcaatcctgggcacaggagaactcccccgacccatccgggcctgcagaccaacaagaagaaccatctggagtccatgcagagatatctctcaagcccacatggagcaccacaagcactggatcccagagcagtctgacaccagctgtcaatgtgctgccaacaagggaagacaggcaagacaggctcttttgcaagcccctaggatagctgctacagccacagtactgaggagcagaccaactgcagaccccacctctgctgctcctcaccaggcagggaccaccagttgaggctcccagcacagctgcccctgcttggatactgtagaaagttgcagctctggggtcctgtgggatggaactccaagagatataactgaaaaaccctctgccctcgcccctgttgccctcaggttgaggtggaaacaaagaggctgaatgctttcacacatctccaacaaggacaccgctgcccagatatgaagaactgggcagactgcacaccccacaactccctgcctttgcttgccacttctggtacccagtgcaagcaccctgcctccacatgagcatttcagctgcagtctagagtcctgaaatccctacccccacaggtcttccctcaggttcttaccacccaagcattctgcctgcccctgcctgagagttcatccagtgacccaggggccagcctgcccctctctatcgcagtcagcacctgaatcctgggctagcctgatctggctccagacccttcaggactcatacatgcagtccagcggaccatctaggggcctggaaactgaggaactacctatcccattcaaattctgctggcacctgaccacttctcacacaagcccaaaggcatagcccccgcctttacacaaagaagcagtgctatcatatcagagaacagccctgccataaagctatttgtatcaggctgagtgatgaagttgccccaaaccactttaatggagaatcacaaaagaggcattttctgaggctctcagacacattggtctagacacagactacagtgtgtgtctgaatgaggagtcatcagccctggaacaggggcatgataggaaaatagaccatgttcctacctatcaaagatggggagccagtgcagatccctcatctccttgccccgccccagagatctcagtgcatttcaccagggactcctcccagccacccttgacagggctggtgcccgcactcaccatgggggtatttgtgggcaagccaaaggctccaactctgcctagctttgtttctccacccccacagagcaagaagcacagggcaccaagcactctactgtccagcccatcatgtaaaacaacagagagcacctcacagcaaacagaccatgtacatacccatctgtttgtgcagcaactggctcatacctgtcagcaccgtctactggcctgtaagttgaatcacacagcccaatataaaactgcccacaaaaatgcatagggttatagaagcaaagccaaaagatgttacccaacacactctacagtcccatcctctaggaaaggggagaaatggaaatatatatagggaaagaaaaaaaaattctaccagcatgaaaataaatacaaaaattagtagcaccaaactctccagatgagaaggaaccagtgtaaggattctggcaccgtgaaaaatctgaacattgtgacaccaccaaaggatcacattagctgttcagcaatgttccctgaccaaaatggaaattcagaaataataaataattcaaaccatggagcaaggatgctcaacaaaagccaagacaaagttgaaaatcaacacaaagaaacttctacagaaatccaggaaatgaagaaagagataaacatcttaaaaagaaatcaatcagagcttctggaatcacctaaggaattttaaaatacaactgaaagctttatcaatagactagcccaagcagaagaaagactgtcagagcttgaagactattcttttgaactaatctggtcagacaaaaataaagaaaaaaataatttttaaaaaagaacagtcttcagacaccaccagaagaaaggaaggtgctatgtaatcagtaaggagcagaggcatttggaactgctaaaatgccagattaccttggtgcccatcagcggaagaccaaagatgatgagaaggatgacaagcccatccaagttctggatgaggcggatattgccttgctgaaaacttatggtcacagcacttactttaggcagatcaagcaagtcgaagatggcgttcagcaacttctcaagaaaattaatgagctcactggtattaaagaatctgacactggcctggctccaccagcactctgggatttggctgcagataagcagacactccagagtaaacaacctttacaggttgccaggtgtacaaagataatcagtgctgattcagaggacccaaaatacattgtcaatgtaaagcagtttgccaagtttgtgatggactttagtgatcaggtggcacccactgacattgaagaagggatgagagtaggtgtggacagaaataaatatcaaattcacattccattgcctcctaagactcacccaacagttaccatgatgcaggtggaggaaaaacctgtcacatacagtgatgttggtgactgtaaggagcagattgagaaattgcgagaagtagttgaaaccccattacttcatccagagaggtttgtgaatcttggcattgagcctcccaagggcatgctgctctttaatccacccagtacaggaagacactctgtgtgtgggcagttgctaatcagactgatgcgtgcttcattcgagttattggatctgagctgtacagaaatatgtcagtgagagggctcaaatggttcatgagctctttgaaatgaccagaacaaaaaaagcctgccttatcttctttgatgaaattgatgctattggaggggcttggtttgatgatggtgctagaggtgacaatgaagtgcagagaacgatgttggaactgatcaatcagcttgatggttttgatcctcgaggcaatattaaagtgctgatggccactaactgacctgataatttggatccagcactgatgaggccaggcagattagacagaaaaattgaatttagcttgcctgatctagagggtcggacccacatctttaagattcacgctcattcaatgagtgttgaaagatatatcagatttgaattgttagcacgactgtgtccaaatggcactgctgctgagattagaagtgtctgcacagaagctggtatgtttgccatcagagcacggtgaaaaattgctactgagaaggatctcttggagaaggatctcttggaagctgtaagtaaggtcattaagtcttatgccaaattcagtgctactcctcactacatgacatacaactgaactttgaaggctttcaatttaaaacttttaattggaaatcctaaccttatatagacttgttaataaccacttcacaaaaaaaaatggcttcaaaattgaaaaaaagaacagtcttcaagaagtatgggattatgtaaagtgattttaagaagtatggaattatgtaatggtattgtgcaaatctatgaattattggcattcctgagaaaggagaaaacaaacaacctagaaaacatatttgagggaataattcaagaaaattccctaatcttgctacagaggtagacatccagacataagaaatcaagagagcacctgcaagatactatacaaaattaacatcacctttctcaaagagcttaaaacagagctaccatttgaaccatggtctatatacccaaaggaatatagattattataccaaaaagatacatgcacttatatgctcattgccacactatttacaatagcaaagtcatggaattaacataggtgtccatcaatggtggattggataaagaaaatgtggtacatatacaccatggaatactatgcaactataaaaaagaacaaaatcatgttcttgacagcaacagggatgcagttggaagctatcatcctaagcaaattaatgcaagagcagaaaaccaaatactgcatgttctcacttataagtgggagcttaacattgggtacacatgggaacgatagacacttaggactactagaaggggaagggaggtagtgggggcaaggcctgaaaaactacctactgggtactatgctcactacctgggtgacaagataaattgtactccaaatctcagcattacactatataccgatgaaataaacctgcacatgtaccctctgaattggaaataaaagcatatctaatatatatgtgtcatcatctttttacagaaatttaggtttatggattaagtaactatatgactcagccagtatccattatttgtataattcaaactcaagtcttctgggcttctccttattctgaaaaattcaaatttctgtcaagaaccccttagggtagagaggaggacacatggaatgggttagcatatgaaattctttcatgaggtcttctaatctaccatgtgttgattaactacatgatatatttcaaacatatatacaccaagaccttggaatgttcataagtgctgttgggactaatgaaatctagatggctgtaagtgttactgaactcatagcatcttattattccatatgtttttccatcaggggataccaaaagtgtaatattatcacatagatagatgaatatttttgccattaggggtcattctcaagaaccaccactgttcaccatacagcttcctgaatctactctttaacatgtaacgcaagctgagcaccacagaattaaattattgcaccatgtggccacttacatgacaaatgaaagccatcatacttgactttaggctcaagagagaaatatttcacctgagcatggtgaccattttgcaaattatgacctaagaaatatgagggacttgattttaaaagtcatattcttaggcatcgcctcagatctattaagtcaaactctgtggagatggggcccacaaaatcatatttttttaaactccctaggaaattctgttacccataaagtctgagaatcaccagtgaaaatggataccatgaataagtactgactatataatactgcatttaaataagattcaaggattagcataaacgtacataggatgtaaggccttgaacatagtggttcttgtccctgaagaaaagagactatgaactgctaacatgttattagccaagcgggacttttttccctatactgagatgtgaggatgctcttccagaccaaatttaagattttttataaatcctctctctctcctacttaatatagcatagcacaaacatcattcattaatattgatatagcctctgtccttattgttactgtttgctgcatttcatttcatttgttttcacattcagatatttattccttgacatatgttgaaaattgaatatgagagtttatcctggtgagtctgtgaagataactgttgccatgaaaaccaaattgtccttagaagctgataagaaaatggaaacctcaatgtgatgaacagtgtggaaccttgaattctcaccatccaggatcagcaagaagcttccacctttaaggtcaacttcaagtgattggtagtggcctcctaggcactgtgtggagaaagattctgagtccacacctaagcctagaccaagagaattagagtagtggaattgatcatgggcaaggtggcagcaaagtgccaggcatttgctattcttcctcttagaagttcaatatttgcagtggaaatatgttccagattacataacatgcaaagtcagaattccagaaatttctctttcatatctgacatttaatgtaagagaagcaggatccaaaaaggacaaatttccaaagctacataactacttgacaatgaataccaatgctagaaccatttcacacccataaaatgtctcacaatgtgacaaattccctttaaccttagccatatctgttacatagcttctagaaagaaagttgagaaaatttccaccatgccaaatcagcaggcagttctcctgaacagtatgtcatgatgccgtatccctctatcaagttgacccccaaaccatcaaaaaataatctgtaatagtccaaccccaaaggaaccaaaccagataatgactgagtttgctctcttaagcagaaatgcatttccagaaaaggtggggagaagggggcggttatctgggataaagtcagctctgtgaaacagaacagactgagtgaatgccacatgttgtgatgtgctttcttccctggaacctactgagttgagggctggagtataggcctacaggagggtggttatagattctccttcccaaatgcactttgaaatgcatcttcattgagccagtaattaaagaaatgcatttttcctgatgatggacttccgcagatagagatgctcacagctttatagatctctcacatctctaacaattagataccattcctctactccagacaactgagactaaaaggaaaattagcatcataagcatttcagcaccttccttctcttagaaccactagatagtgccctttcatttctctgctctttccttctaatggttttaaatggatttcttaaaaaacaaatcctgtacagaatgttcctccaatctgtagagataaacacaattggtgcccataaagaaactgatgctccatacaagcagcttaatcagaatcatcctagagtgtaggcattgtctacacatgactacagaaagaaagggaatgaaagcagagtacaaggactgaggcaagctggaggtggtccctgcagcagtatcctgtgatgcttggcaacaggaaatgagattaaagaaatgtatctcattccccaaatatgaggcttttccaatttactacatctcctctatacctggccaggtgtgattaactacaaggataaggggtgagaggaaaggagcaagaagctgcaactagatcttctgctaggtttacaggtgggctctactggcagcacagacgctagtttattcggggaccttgtgcaaattagaaaaaggtaacccttgctcaaaacactttactgccatctgctggaatgttgtcaaaataactattcacatctagagtcactacaagaaaatatcccctggaggagtgccctgttgcttacaacccaaacaattgtaaattgaggttgccttgggaggaaatctagtctggcaggtgaaacaggaaatcccaagactgtacaagcatggttttgggccagtctatatcaggagaccacaacatgtaaatcaagataaggcataagccatgatgaagcactccagggggagcccaggctcaggaagccagtggagtcattgcctctgcagtgaggctgatcatacaaccagttgctgatggaggcagaagaaactcagcaagtccgagacaggccctagcaccaaccagactgagggagtagggcagactccagtgcacagaatcagacacagatcttcagaaaatgaacgtaattgcaaggaaataagtaattgcaacacaggctgtataagcaccccaccatagaagttagcacagagggctgtaggagcacataacaggtgcacttaacctcatcttggagtacctgaaaagggttccagaagaagcagtaactaaggtaaaacctagatagaacacagttcctgccctcaaggagtttagagaataggtctgacctatctaatacagtagccagtagccacatgtagctattgagcccttgaaatgtggccggtgcaatggaggaactacaattttaattttatttaattttcattttaaaactgaagcaatgcaaaatattttttccattaaacacaactttattgtttggtaggattacgtttcactctaaccattgcattggataagatattactgttgtattgtaatgtacatgtatttttctccttttagaaaaattacatgtcaccctcattatatttctattagatagtactgctttagaccaaagagatagtcatacagtctgaaaagtaaagtattcattataatgctgggatagaaataggctcacctagtactcactgttatctggaaatattaaacaaaatgctcagaagatcctagatggcagagaaaagaacacgtattaaaagcaaatgaatgtaggctgaatttataaataaatgggtggcacatacttaagcagagaatgtagaggagcacctcataatctgacagagacttgtccttaccctgggttagagtctgtggctgttacagatgtggaaatatgatgttcacttttattacatcagtcagtgtgcattaggctacaaataacaaaaagtctaacagccagtagcttcaactttaaaagacatccatggtttactgtttaaaaacccagaggtaaaaaaatctatgggtggctcagcaggtgaaatgtgtcttcaaaaattcagtaactactatccttttctccaccttccgaaggattcagtgttttatcatagacttgtcacttgaaggtcccaaggcaagaagcaataggggtgggaacagccaagttagagaatttttcctttaggacattgacattccagttctatccctagcttccaaggaggcagagatagcaattatctggcaaaggagagccagaaagccataatatgtttacacaaatcctaagtgttccattgaaactggacatattgctgccaggaattatactgtggtcctattagcaaggactaaaggaaggtaatgcataatgtctgcagcattcactaattgtttcatgatatttaaatctcctatattctgattcttagcaggtagttggctaaaagacacttttaaatgagaaaacataaattttttataatcatatataaaggaggagagctacgaaaactctagccaaatcaaagctgtagtaatccaatggcaacttgcctgtgattctcttattctcattcaggaaaagtggtgttatctcagtccattatcttcactgagaagaacaagtatgggattcacaatgactgaactgaaaaacttgtttttactgagaaaaaaatgaattgtttctagtattcttataaagggatgagaaacctgtaaattgctcagcattattgaaccaagaacaagttatttttcaaatttttccaagtaacaatggttgtaaatggaatgctgtcctcagtgattttaagacacatttcttaaaaaaaaatattaggagctataaactgaaaactgaagagtgggaagcaataataaatatcaataatcttggccactgaggaaaaggaatctccatgtgataatcacatggaaattcaaatgtgccttcatgatatacttcatagtattcttgtaaaccacttccatggaatgccttgccaccaggagaggccacacagatcaccctctgcaaggacatgtcagtgcaaagaaaggaatgacacagacataaatcaaatgaaactgaattatgtttaataattagaagtacatgtgggcctttcatttctaaaggtatttattccatttctatttgtttctagaagctaaagtgggtcctggcaatacaagagaaaagagcactaggtcctacccacaatctgttcatagcctaatgggagagacacatgggaaaacaaatgccattagaataacgagtcttttagtaataaagacaagaggctataaaaatgtcttgtagaggaggtgatattttacttgagttttttaaatgaataaacactttccagggagacaatgagctaaaggagagttctggatgagaacccaaaggcagccatttgataagcagaatggtggttggagaactaggcaaattgttccacaatgcgtgtaataaagaggattcgatggctctgaaagaacagaaagaaaaaggcagagacaacatgcaaagggccttgtactgcactacagtgaagtagtaagtacagagttttgcaattgaaaagacctaaaatcgtgtcccagccccttcactacaagccatgtgatttttaataagacatttccattttctgaggctcaattcttctcttcatctataaaatgtgggtaataaatacttcccagggctcttgtgtggatgaaataagataatgattataaaagtacttggtaaactgcaaagcagtatattggcatccattatgcttatcaatatacatgcattgtggttaagtgggatataaaatcagggcaacctgtattcacattaccatccaggaacaattgtactactgtttcccagtgaattagtggaggcaaaacgggctgcaaactagcttaagttgtgagaactcatctaacagcgaaaataatgctaattaactgtatcgtgactctagtggcagagagccactaaagactacttctgaaagtgctgaaaacttagtagatgggcctattgatgtaagtcagtggtggttttatagatacctttcatggagctgtttcatttctatctgaacctgttagctgctgagcataccccagtcctttcccatggaaaaataaggcagctgtgttactaggagcaatggtcaaatgtactgattacagcttcaccaccactaccagcatcccaatggtgcctgtggaaccttgttaccacggcaaccatttacaaacccttcaaaaggtctttctaaggagttctgctggagtataagctataaccaaagccagagctggctcaaataagtaaatctgagctctagcttcagctatgtccctaaatatttctaaggtttgagaaatgatctcaacttattaggctttgattgctccttatccagagaaaggttagtcttcacttttataaggctctgtgaacaccgtccttcaaatggataattattgagagcccacactataacaggtactttacaaataaggttctccaccaggagccttcatggctatacgttttcatccagcatttgtaatggtttccttcagtctcatttctcttttctgagccatccaagtgaccttctccaccaaaggtgagcctttttagaaagatgcagttgctctttcaaaaacttgcatctttataaataaatggcaaagcctttgtaatatttcttaaagagtgaatcgggctgtcaaagttgtcttacaggctttccaaggagctctggtgcaggagttcatgagtccaaggtcccaggggagcaatgtgctgatatgcataaggatctcaacatcatttattagtgtacttaaagtaaaaggaaagatgaacttttcataggaagatctaagtttaaagctctatttaattcattctgtgtaaccttggataagtcacttgatttctcatccactgtgatcaaatctaaaaatattaagactatctctcaagattgttgttagactcaaataagatacagtatatgtgaaaattatttaagagcatatgttgttactttctcatataccaacctgtcctctatactaactaattctaaaatggtacatgacaaatattgagctaaggtgtaaggactggtcagacagccagaaccagatgaggaaacacaataagaatgactactctgaaaaaaatagatgacttatgactagtatttagggaggaagagacttcggtcttcaaactcttgaaagattatcatatgaaagcaggaagagatttgtgaaggaagccgtgaagagactgagaagttcagaatgtagaattagctgatccaaaaaaaaacacagtatagaaatgcagctaatagactttcaaatcagaacttgagtcgatcccagttctgccactctttctggatgaccttgggaagtttacttaacttctctaaacttcaattctttcatccttataatggaattaataatactaacaacctcataaggttgttgtgaggattaaataagattagtgatataagagtcttaagagagccaatggctcatggaaatgtttctataaatattgactacttttattaaatgatgagaggttgagtaggaagaaaaggaagatagtctaatgggtggaagtttctgggagacagattcaattccataggagggaagcatttccatgcataaatgccatttgacaatggagaaggtatgctgtccttgttcctctttctgagtagtatccctggatgccgccttaagccaatggtctttacctacaaagcttggtctaggtgtcaaacagtacccttcccttatttgagagctgaaatatttgaagctgagggagcaactaagggggcagtactgccttgggaattaactaattcaaaatcccagaagaccatgctaatacattaccaaacctatgggagctgggcaaagagagaggatcctggagggaggccaacaagaaaaaggaagtcaggtagaacctggagttactactcaccaagaaagaagcagctgctggggtgtgtgtgtgtgtgtgtgtgtgtgcacaaggctatccagtggggattgttggagcacgggcaggggcagatgccctcttaaggtgctaagttttcagtcactaaatcttttcttacagaagcagggagccctctaaaaggagaccacagatggtgttacacctctggcagaaaacttggtctgcatgtatgagttctatatatacatttccaaatctaacagttatacttttcaatgggttataaggccccatataaggtgcctatatagccaccttctttcctccacccctttccatacatttagtcaacacatatttattgagtacctactatgtagcagacatggggtgctagttactgaggaaacatggtttctgtcatcaggaagcttatagcctaaccactgttatccagtagctatataatgtgagccatgtatataatttaacattttctggaagccacagtaagaaaaaaaacaaataaaccatgaacttagccttaacactctattttatttaagtatatccaaaatattacctcaacgtgtaattaacattttaaaaattattaatgaactattttgcattttttgtattaagtctttgaaaatccagtgtgttttttacacttacagcacatctcgatctggactagccatgtttcaagtgttcaatggacgtatgtgcctgttgctcccatattgaacagtgcaaatttagcaaagagttcttttagaaaataataactatatagactgagagcagagataagccctgttttgtgggttagcaatggtgtgctggtagttgtttaaaaactggcttcagggagtagataatttgtaatatctgctgatttccataatgccttaacctaaatatcaggccaaataggaatgacaccttcttctgagatcataaaattgttcttcaagtgctgaagaaacaaacttctctccctagaaagtggacacaaaactaagtcagggacatcagagagaatgtggcctggtttcatagtcaggtggtctaaactccaatcctaaaagtttaattatcttcaggaaatcctcacactttagctcatctgtgcaatggggattacagcaattgctatgaagccacaaagggataaaatgcatgaaggagtcatgcaaggacccctacaagtgcaaatttttattattgacttttgcaaacttccatcagtgaggtgttcgaagtacttatcttctaattgaccaatggagattatatctatttatggtatataacatcatgttttgattaatgtatatattttgaactggctaaatcaagcattagcttgattataatgagctaattgattatgttgtaatatgttaattataacgtattacatacttattttgtgatgaaaacaatatttactgtgttagaaatttttaagtgcacaatacaggttattaactataatcacatttattgtacagttgtacaatagacctcttaaacttatttctcttgtcttttggccaatatctccataaccccacccctaagaattattattaattattctagcttgcccacttaggatctactattactatgggaaggcaggtggccacttaaaggccccaaggaagctccaaactgtcatgttcctaggaaatattaggagcaatttccaggactaaggttgcccagccccctcccaacatgttcctgctgtccaggaaaagtagcttcctagagagataattaagacatggtggcaatttctgcatgtctctgtggctcttattattaatgaaaaggggtagggaggagcatgatttactcatggttctgtaatataatcacaaagtaatacagcttctcaaataaatattgtcaactaattgccatcaatcctcaaaaggccagctgtgatgctgtgattaatgggcatttccatcaaagcttctcacacagcagaactagaacagatggctacaggtgatcagtggaactaggtgatataggggcaaatattaataactatgactatttatcaagtgtttcctggggctggtttcagccacaaaggcaggtgctgaatattctgagctgcccttttaagcactaagaattatgatgatgctcaaggtttgagcctggtaaaagccctccagccagtatctcctcatctattaaacagagcaggctcataacccacactccagagtttagttttagaaggttttgcttttctttgtcatgatatatgaatccgggtaactgttactgatcttttgacgtggacatgggagacacagtcaatcatcaagacatctggtaaaatgtccagagcagaaagtcacatggtgccagaatctcccaaggcgagaaagaaggattagagttgccaaatgaaatacaggacgcccatgcaacatttcagaaatatttatcttaacagattatttgttgtttccctgaaatgtaaatctcatttggtgtcctgtatttttatctgctgcacctgtcaaccctaagatgggtacctcccaggttaaaggtacagcagctagctaatttgtcccacctcaactagtaatatcctcctcacattctttgtactaggaaaatgaattgcttgtgacaaatattaattaaaagccaaaattttacattttaaagtacacttgaggtatccatcccattttctgtccttcctttgaattcacaaaaataaagccctccctcattattataggttaaaatggtctttgtcttctttcaagttattttaaggtctcattatgggccatattctctattaaacgtttcaaatatagcaattagtgctcacaaccaacctacaaagaagatattttaaaaaaagaagaagaagaagaagagaaatgtcaaggttatcagaacctaggaaagtccaaaacactgccacagccaagaggaccctagagagacatcacaactaaatgtgatgcggcatcttggataggctcctaaagaagaaaagggacattaggggaaaactaaagaaataaaattaactatggactttacttaataataatgtgtcaatattgattcattaattatgacaaatgtaccatcctaatgtaagatattgataaaagagaaaatggtatggggtatgtgggaactttatactacctcctcgacttttctgaaaatctaaaactgttctcaaaaataaagtctactgtatttaaaactgagaaaatctataaaacaatggttttcagacattaaaaaatagaaaagaaggtttcttaatccctattttataaacaaataaattccatagaacttaagcacctttcccaggttgcacaggtaaatcaatggcagagataagattcaaatccaggtagactccagaacccatggtgagatgcatctcatgtaaaatcaatccagggtgcactgtttgggagccttcctgatagggaattataaggatctattggaattagaaactctgtcaacttctttgtaaggtgggttgttttccaaataaacagatccgcttgatttttaaaattaattgccaactggggctttattaatagagcagcaggggtctaagaatagttccaaattgcgttcaccttgggatttaggctgtcaggacaagtctgaagaatactagggcccaggggaaaaggcgggccgggtgtgattcaaggacaggggcccaggcttagaggggtggggggaaggaccctgagaagaggatgcgattctctctcagatttttccctaacctctgaagactggagtctaaatgatggagaaagagagctgcagtaaacaagttagtaaatatagctttgtttgtttataatctccctgggccatcaaggggacattagcagcagcaggttctgtggtgacattacaggacacatgaggtcagtgccagcagcctttggacaggcataacagccttctacagcaaccactccatcaggcagtggcagggcagggctggaagaaatctccacagcagatcagagcatgagaggaaaaaggctaaaagcaggtttggcaggggagtggagagcacgtttgagatctgctgcagggactttcaggaccctttggaggaaaccaacgtcccactaggcaagtgggggcagagataagaacaaactgatttctggttatttttatgaaatattcttagcccctggctgactttctctggaataattagggtacatgaaaaacaatgggaacctcactcttttttacatagctttcaaattcaaaaatagtctcttaattctaagataatgaataagaaaacataaggaataattactgtgaattgtctcaaaatgtacattctagaacgtctatcaacatgtaataaacctatgttctatagctacttttaagtttttcttatgtcactaaaagtcttaatttcacagcatgtctaatgtaaggtttccccaaagagaatgtattttttaaccctgctaagcaatttataaccctttacaggagtcagatattcaaaatgcttttatacatatctactatttttttctcattttcttcgaaaatcatgaatgcagttattaccaggaatttttccccttgtactgttttggtgccttgcagattaccaaaagcctacaggatcactttctcacttgaattcatttaaattctatggtatgtgcagggtagcatgagttggtagtagtggtaaggcatcatttattgagtcttcattaagaatcaggcactgtaaaagtgattaattataatggttaataattgttgagggcttattacatgccaggcactattataagcccttcctatgaattaatttaatccaataagcttttggttcagaccacaaagccagacatagccactgctgtgtcctgtttattggggtcaagagcctcttaaagatgggtaattttcccgagaaatggctggatctagccatgtgcttccacatctcactgtagcctctgtggcacccatcccttgacctggtactgccagacagatcctggctgggagctgatgcaggaccagatggcccatgttctatagaaatcaatgttctatagctaatcaatggctattgattaacttatatgcaataagaggcatgatggagtcgagtctagccctctatgtttcttcggtggccaaagcatttcttaatccagggaggtattaaaaagagaacatcttcagctgtacagggtctaatcctctgaggcacaggccaagagataggaatagatccacggtcttggcattcatctcatcaggattctccaaaggggtaattcacacatgggattccaaagccaaacagaagtggtaacttagctagccaggatgcaagggatgagttgtaaaccagggactgaaggtgtggggctgggaaccaaaaaagcggattatattaatcatgtttttttattttctctatttttatgaggctttgacatcgtgtggatctgggagggactgcccctcccagagttagctaattcttaaagatatcaaactttctgagagcatgccctcgatatgcaaaccaaccagttctcccccttttaggctaccacagtctatactattttagtctagaatagtctagtatacactatactacttgcctaccctagttatcacagggccagttatcagccaagtaggagcagtccctgtgttccagagcttgctaaaattattcaaacagctaatcctaaaatgatcctcatgaccctgtctcacccattccttcccatgaaaaccacaataaacactgtcacccatgctttcccctgacacactctgcctcctgattcaccctggtacttctccatggggtgtggataatgatcccaaaagacgcaatcctgaacgccataatctgaatgttgaaatcccaaaagaccaaaatccctaaagtctaaatccctacagtctaaaattcctaatgtctaattgaatctcaaagcacaatgaccgatttagaattatatacagtcaaggcttctgaaagtgaattcaagctgttaccaataataattgtttttttccattcagcccaatgcatttgacagaaaattcaaatgagtgaattggccatgtgatacggcaaagatgaaaacttcagtttaaaaatgcatcatgtgtctgcattggtattccttccagctgacgaaattccttgagcttttatgagttaaagccatatttgcctgaagaagcctaatgaagttacagactggttcaaaaataattatatgcacagaagaataagaagacatgcaacagtgttgctgttccatcgccaatattgtttctcccaaatttttggtctgtatatgagtgcatgggaaatgaatttccacatgttcaaagcaacatggaagatggcacagaagatgagaaattttaatagaaaatgctcatgttggggtacagcaaatcatagaagaattttaaaaagagcagcaccagagtgagcatattctccaaggtgggtcgtgccctaaaagaaaaaatgcagccatgcctcactgtggaagacttcaaaatatagtcaatgatggtgaaaatcagtcagctcttagggactatctccatgcaattgcccataaactatttccatatacttttccatatgtcaaattttctttttcatttcttggggggttttctggggttattttttccttttttagtttttttccactattttaaattgtcagcattatgttttacaatttgctatgctacatatctcatatttgcatcattttcaatattggagatataaattgcttagagacttttagagagttccaattcattttatgtattttttgcagagttgactctatgtaaagtgtattatcaaaatgttgacgttgtgtgtaagcattgtgcatgtatataacaacattgaaacttcctcagtaaattaagagatgtccattttgtacatctgcatttgtgaaagataaactctctcaagatctcgattatttgagagactgcatatgcagtggtgacccatggcaggttttgaccaaatatcaaaagacttaggttatttgtcacggtgtttcagatgacagatgttataaagctggtcacacaattaccaaccacagtaatatacatttgtacatttccattttatatatatatatttttattatactttaagttctaggatacgtgtgcacaacgtgcaggtttgttacatatgtatacatgtgccatgttggtgtgctgcacccatttactcgtcattcacattaggtatatctcctaatgctatccctctccctccccccaccctactactatactttcagggatcatttctatagtttgttacatttccatttttgacctatttctttataaatatagtttgtctgcttgtaattgttatacctgcatgactctttaccatacctgttttatgcttgcaaaaatatgttattgtgtattttgctgtgtaaagtggcctatgaagtgttctgtcacgtttttatatatttctcaaataaatcttttcaaaacaaataaatatcttttaaacaatgtcctttagtggccaagtgtggtgactcacacttgtaatctcagcacgttgagaggctgaggaggaaggatcagttgagaccaagagtttgagaccagcctgggcaacatagcaagaccttgtctctacaaaaaattaatataaagaaaaaagaaaaacagtagtgttgtttgttatttttccagaattgtattttcaggatctttcaggattatgatcagctcccagtttggagaactcagttgagaaaccctgctctccacacatggaacttcacaaagaattggcattcagcaaacacttactgacttggcaaagggaagtgtctctaatgctccagtacaaaggtttcttagtttgcattccctccgaagcaaaccctgaacctgctgcaagtggaactgaatgcaagtagttattcgtgagataaagaaaataccaataggagagaagtggagtgagagagaaaacgaagacagcattttaagggtacattaacaacccagctaccacggtaggtaactggggctcagtctcaccgaaaaaactttggaggccatgtgcctcaaagttaacctcccagaggggtgagggagctggagtacataccgaccagctcccatcattcattggcaaggacttctctcaggggatgtcaactctctagcacttctatcttgcccagtgcagggcaaagcagactctagtgactagataaggccctcaggcaaagaaatgcaagtgctatcagttggatgggtgtccagtgggatatgggtgtggtatgtggaacatctactacagaaaagatcattggcagtttctgaaaattccaacaaagatctcctagacctcattctccaaaaccaagaaaggagaaatgtccattgattcctttattaaatatacacatactgcctgttttgggatgtaaacatgtgccaactgtacaatctagtagagacaaaaaaaaaaaaacagagacaagataataaaatggaagaactgtggggagggtaatgtagctgttcacagggttaaaatgcatgattactttgatacagcctcatgtccagagaggcttgctctatacttttcatgtcattttaaggggaaatcataataaggtctgacttcatgatcaaatcccagcattcagacaatgttacatcaacatcctttaatgggtaagtttgcctgtctatttcgtgctgccataactctacttttgtccgtggaacaatgacaatgaccacatatcacaaagagaagcacttggttgtatcaaacacagaagaattctagggatgaaatggagtacctcaaggcatgccccaaacaggatttacctggctgactcctccctcttctacattggaggaggaagcacatggaattccaaaatcatattgacttggctaaagaccccattcatcctttttctagcagcaggactgaatcatacaaagtccttgagcttcagaattctcaagtgtaaagtgggaataaaaataccttctttacaggcttattgtgagtatgaaatgagacatgggtataaacaagcttcactaagtgtaaaatgctacatgagtgttagtagttgtcttatgcttcatggaccatgacgaccttggtcactagtccaataagaataaaatgatcattcacaaaggataagaagaaaggggtttcctttcaactctacttctagggaagggaaaacaaacctgtcctgagcttccaatatttttattatacttgaaaaagcaaaaggtatacttgaaagcacacccctcccatttcagagtgaatcatgttgctaatcaccaatactaaaatcaagctcaaaaggaggaatgctcagtttattttttcagcatttgaaagatgaagcacttaattacacattctgtaattagtttgtaattcccacaaaaggtgtaagaggaatgttaatggtggccgcatgccctgtgaagagggagcaacatatctggcattcaagcaccatcccataaaaggggttcactaagtacactggggccatcaccagctttgttcaactacaaagaaatcctaaaggcagctcccatcagcacagtgacaatgaaggagaaaggcaaaattctttatatatgaaggtctgccaaggccatcacctagagagttaactacttaattacttcagttttgtgggactgttggtcatctcctcagaaagagatcagggagtagagttgagatgacattttgtgttggatgttcccagaagtcatagggcttgattgcctcttttgtattgttcatttctgctactgttatacattcctcccagaactggttcccttgggtagcaagcaattaccaaaagcatttcaaatgcaaaggactacagagtatgttcaaggtaatcaggaccaagaagcctgctctccaggcctaagaccaagcaatggggatgtaatcactgagctgccaccaattcactcagcaggtgcctggacagatatgccccttgagaagaggagttgattttctgtgcaaactataaagtgtgacttacattccaatttgatgggctctgccggctcatagaagcagagggcaattgggtagactgtttgcaaaagtggccccaattattcacttccctgcctccagacctgcttgtaatgtgattttgaaatttttcccatcaaaagtctattttctaatcccttgagtctgacctggcctcatgacttattttggccaagagaatgtggcagaaatgacattgtgccagttccaagcctacgcctgaagagaccttgcattccttttcttggaaccctgtccagccactatatcaacatgaacaagcccaggctagcctgctggctaatgagagacacatggcccagtcacccctatagcctcaaccagcagccagactagctccagaagtagagcttcctacctgacccacagctgaccacagatccaacatgagcccagtgctacccaactaacccatacaattgtgagttaaaccaatggtggtagttttcaacctctaaatttcagtgtggcttatcgtgtagaaaaagctccatagagagacatatcccatagcctattctggtggcaaatgtcaggcacaatgatgccagagaaacaaagtgtttggcttctcagggacaagattccacaccagaactgtctgtgcagccccaccccctataacaaggcttggtctgcccacttgggcaactgcaaacaccagcctctgggtgttgctctgcatctctgcaaataacctcaactccagctttaacccaccattccttgtgctcaatttctatttgtttggcctagttttgccccctaccttggttcccaccatctacctgcccacatttatcttgaacatctgtctgaactcagcacaattctcccactccttcctcagctcctcttcatgctcctgctttctgacttctgtccataccactggataagaactgctcaccctaaggtcactaatggcctcctaagtccaatgttcaatggccccatctccatttcctcttattcaacatcactacagtatttgacactgtcctctgtgacctgcttttaagagagtgtacttatgaaagttttccaggaacctcatttgaaagaatcctttcattctagtaagtctaaaggcttgaacatgatcatagtgagggacttgcatagtcagaagcattttcaaatgacagaagtatttccaatgttaatgagaaagatggctgcaacatttaaaaagtgggatagatatactgagtatgattcttcatgttcttagcttgttgcaagccaagtctatttttaagggccttattttatctaaaaagatagaaggtgaactcattggacaggagtcaagaattcagaactagtcccagttctgtcatttatcagcagtccatctttgtaagccacttaacatctctgaaccacaatctatcatctgtgaagtagaaacaattgccagactgtaacctacttgagggtagggattctttgtatactttttttttttttttttgagacagagtttcgttcttgttgcctaggctggagtccaatggtgcaatctctgctcactgcaacctctgcctcccaggttcaagtgactcttctgcctcaacttcccgagtagctgggattataggcacccgccaccacacccagctaatttttgtatttttagtagagacggggtttcgccatgttggccaggctggtctcgaactcctggcctcaagtgatccacctgcctcagcctcccaaagtgctgggattacaagtgtgagccaccgcaaccgtccctgtatactttttacccacacagcatagccacattgcctacaacacagtgggtgttcaataaatgcctaaatgtttgttggctgaatttaaaataattaaagacctgcagtttatatgcataaaatcataaactctaatgggatcactaccacattgccaaatccaccagaatataagtcccccatgatgattttatctttccacagaattcttcttgaaggccatttaaacacattttcctctgaatgaggttggcagcaatggaacagaagataagctaaatcaccggtcctcaaacttttgtgtctcagaattcccagaaaaacttgtttgaacaaagcccagatttttgggtcccactctcagaatccaatttggaaggattgaattgaagcccaggagtcttttgtaaaaagtcagtctctccaggtgattctggtgtagttgatttttctcatgatttgggaaatactgcctttacccttcaagatgcttacatggtgtcctgaaccttccttcccacttcccctactgaaggctcatggatgatcattcatactgagtgtctcgcatttttaactgtctcagcccagatccaagacttcaaatgcaattgattgtactgctacacagaggaaaatggccgctggccttgggaagtggcggggttctgccccagaatactaagagtttatggaggagtttatggagagtttaatggaggagatttagtgagacaggctcagtcccctatgaatttatgagtcagaacatctttttctgtcttgaaagtgatttacaaaggagaacagtgtctttgaaatgttatcctccataacaaagagatgagcatgcatctatttaagttaagactgttgttatagaaactacctattttaagtgcataataaagaaacaccacatactccactgaaatgaacaagctcttactagtacttgggaagtcttgcttgttttaaatgcccatcttggctgactgggcattcagatgtgtttgtctctcaccatggagactgagcaatggctcctctccttgcttctaacatgaaccttagggttccaggatatcccaaaccttttatttcacaggccctgtttaaacacaagagacactaagttaagcaactcttttctagtagcaaatgagttttaaagtatgaatgtataagtctcttatatatcacattattctggtgaaaataattatggacttccttctttgcccatcatgtaaaggaaagaaaacccttagccaagcttgcaagtcttctcagtggaatcctcaagaggttacctccttatgcctaaatggcttgaggcagattttctgctgtgacctactgccagagcagaaatgttccctttactgcacactttcccctgtcccttccctcgttctactggcccagtatttggaaagtgacatcaaaatccctgttggaaaagacactttggattgggctgctttctagatcaggtgtctatggcaaaccttttgttaaagtgccagatagtaaatactttaggcacacccattcaactctgccattattgtaagaaaacagccataatgaacatggttatgtcccataaaaccatatttgctaaaatacatgaaaggctgcatgtggcctttgggccatagcctgccaaactctgccacagtaggtactattgtgttgctacccagagtctctcttccaggactaaaatagtcatagctttagatgctggaaatagtggagggtgaaggctcttagctgagtacctcttagctgaagagagcaaccttgactaaagtaaactctgtcttctcaagggctgttcacatccagtgattggttatgggggactataggagcccagtgcattggcccaatccagcacaactctgaaaggccatcccagacccagagctccctctaggctgactgaggcttttttttttttttctgcatttcagttcaactttcctttcttcccagtcgttcttccttcattcccacccaggggttgatctggagagcactggctgtaaactctctgcattcaaatctcagagtctgcttcccagagaacccaatcttagataagcactacccctcttcttccaatcaagctcctctttaaccatggcccactctgatgggcttgcttacctcctagctgaccccatcactctgtacgggccactgtgcagagggctggccagcagaatttctaggtattgttccttctggaacacatttttatcattttgctcaggccacggccactgctactagcatgggtgctgctactattgcccactctggagagctgctcacaggtaagtttcaaacagtaccctgtataacatgcagactccagggcctcacacctacataatgtgttatggtagatctacaatggagcctaggaatctatatatttaacatgcattagcaagcaccagaggtgattctaaaattggtggtttctgaaccattcatttagaaagtttgtactatgctagcacatagtagctactccataaatgccgaatcaagagatatttctaagtacctatcttgctaaggtagttataatccaaaacacacacacacacacacacacacacacacatatatatggcaaataagttaagaccagttaaatcagtatgtgaataatctgaattacacagagaacttcagaactaaatcttccttgaggataagagtcattaataatacctaactgagatgagaacaggattagaccagttaaacttgggaagaggttaccagctcacataggaacactggactgacatataaggtaaaggcgtgacaaagctggatgccagatagcaggaatgagaggggctgcagcataccctctccaaagggggcaactgaaacttttatccatcaattgtgacatgtgaaaatggggaaacagtattgccaggtcatcgaactttcaagactagactaaaactggatactcacaatataaaatccataggtttttaaacattggctcatatttactgtttcttgagtctataaactcagttaggccctcaggtattctgtagtagctaaatgtattctgagggcagcaattagggcaattgctctatttccgaaaaagaaatattccagaattcccaaggagtgtggtcagaggagtcctgggggccacctttgcaggaaaacaccataaacattctgtaatgaggcagaagggaacataagcagaagtttataaggagaaccacagttcaaatcatatataaacattcctggaaagagagtgcagcaagggtcagaagggaaatatggctgaagatcagactctgcatcaaccctggggatgaccaggggctcggttcaaagcagagaaggtgactgcctgaacagaggccatctccaggagatgcagaataggggctcagcttcacaggtcacagagcttaggctgattagaagtcactgtgggagttgggttcaaaatcaacttaccctgccagtgggtaggatgtatttttgaggtagcagaggtcagggtattacaggcccatcatatagccataggagatattatattttcaatctcagataaataagccaaaggcctgttacaatcactcttatttttgtttgctttagttggcaagccagcagtgattgtattctagaagataaatgtatatgagaactgacatcaaaactggcatatctaaaggttaataattttaaaaaattaaacaactttcttaaaaatatctcacctccaatgatggatatagttcttaatttaaagttaggaaaggaaggagacccagatgttagatgtacttctaccaccaccagactatgtgacaggtgcctaccctggcttactccttctgtaaaataagaagtcgaaggggatcaaccctcaggttcctttcagcttgaacagtggtcatctgtatctgaatatttaggccttgtttgcttgcaagtaacagaaaacataacccaacatggtttaagcaagaagggaatttattatcttatataatttaaaattctgtgtcaggggggcaatcagatatggattaatcagggcttcaaggatgttcccagaaacctttatttactggctctgtcttctaagtattaaccccagtcttagcattcacatgagagcaacacactgcaacaatgcaaagatctatattctcttcaattcaagcccagtagaaagactgcttctttccatcccatgtctcagtgacagtccaaacatatatcattggcttagcaatgaacctatgacccaatcaaagttcatctttgtagctagaaggcatgcgatgagttgactggcttaggtaacatgtttctctctgaagacggagagtaaaattttaccaataaaattcccaaagaactggtactaaaagtgagatagacactgaatgcccaaaagaaaggcaaataaaatctgaccttgtgaccttattagatataatatgttatatacataaataaactgcttttccaaacatatcccttctgataagctcattaggtcatttaaggtattactgtcataaagatgtcatagaagcagcaattacagtaatctacctcatgttggtgtttggatcattgacaaagtccttcacgtattgaacagactctactttgttgtttttatcagaaaacctgcctgttttacatactgaaatcaagaactaatccaaagaaaatgtacccctgctactactttggactcttttagaagaaagttactcacattctcctaattgagactatttcctgtggtttttcaccctggaaatggcttcatagacctcaagaaaaccagctaataagcatgaacctgatcctactcattagacattgaaatgaggagatttaaggacacataacctctggggagaaaatcagacagaaaattatctaattatatttcatagttaagagtcaatagggtaaaatttaagatagagatttttttaattagtaccagaattctctgcttgcattcttcatattcccgtagtcgctggagaaactgctcactgtggaactaagccggaggttcctaggacctctttgcctttgcacatctgaaaatgaggccattggaaaggcagaaaagtgcagccatatgctggcatcagtcagatctttccccttgattctggttgtttctttagaaaagttttggggttacatgatgagtgatctagcaaagctggcaattaagtggatcgtcaacagcaggcaagacttcttgtgcaactctatttcagcttgctttaacacactatctgcagttatactataagaagtagtgatggcacaaaacttagaagattcacaaaaaggaagaaatctaggccgtattttgaggtagtgtcattaaaatttcaaatgcacagaaatgcaggaatgctattgtacagatgatatgggtttcattagtgtagagttgaattcatagttctactaagccagtaggccctatcacaaagccaaatatgctgactatccttctaaagcacaagcaatacaccagtgtcttatgtctcagtcatggttatcttactaatttaactgcctttttttgcagttaaccaagttgtaatatttaattcactgcaatttattttgctattgctttccaacatcctctcttttgtagaaaatttaaaagtaaatacagagcatttgcaaaataggggaaactattatgggacatgctcatctcacaagaacatcacaagttaatttttgtcctatctgaaaaagaaaaagatagagaaaaaatgacataaacccaggatctgcaaatccaacactttgtgccacaggttcatgaggaagatatgcataggggaaatctcagaaaaatgcattttctttacaatgcactttggtgggcttaaagcagaagtatgctagctgcaagaacttatcatccaaagaagcaaactatggtccatgggccaaatcctgtcctctgtctatttttataaataaagttttagtggaaccaacactcattcatttaagtattatccatggctggcttcatgctacaacaacagagataaggagttgtaatagagattttatgacctacaaagcctaaaatatttactattctggccctggaaaaacagaaaaagttcttccaacctatgtcccaaaggctagaagcaagtggcttttatggtctccttatcttagttagcatctgggttttatcacaccaatgagaagagtaagaaggaaagagaaacccaagaacacgtgtgcccaggaggaaaatttaacatttccccttgagacctctggcagagcaggacaaggttgcccaccctaggccttccaaaggcagaagactcctttcagtgaggcgacagctccattacagccctcataaaggaaagtgatgcacttgataaacttagaaaacacatcccagtgactagcaggcatggtaattcatagattactttattgtcacacctcatagtcccattcttacatgcctcacatctaggtacattctttgcctcagagagattatgtgcgtcttccacttaatactgttcattgaagccatgtcttaaagaatgaatataatttgatatagatataatttgatatagctatattaacagctttgtgcatgaagataaaatgtggagtaatctcaaaattttcacctttcccctcttcacaccccaaactattcttcctaacctgtgacccaatagctctctgccttgaaagccattatgttagcaatccttctcagaatgaacctctgtgcgtctgctgcattgggaggatggtgggggaagagagggtcatttactcttcccataggggctaactctagttatatctctacctgcgttggtaggatgtgttgttctgaaaaataagggtccagcgggaaacgcctttccctctatgatcatcttaatgatttgccatgtacttagcacattaaagtctttaagaaataatataatagagaagtttgtttaactttgtttaacccagtataaaacttcatggcctacagcaaacatttgttctaacacttacaaatctgctggttactataatttggctgatctaggctgggctctgctgggcacctctgcttcaggctgaaagttggctgggcttgactttgagctatcagttggattcaggtcagcttctggggcccagccagcctaaagtggcagcaactacacagaggaaattcctgcacaagcgtatgtcaagcctctgttcatgtcagatctgctaacatcccattgaccaaggcaagacatatagccaaacccaagtccagggacaagcgaacatatcccacgtaccacaagcccatggcatgagcttgggtatgtgattcaaccactctctgacaactcattggctttctggcatttcttttatcccatcttaaccccaccaatattccaactaacatctccagcagttcccaacttttttggaccacaggactttcttctgactaatatttaccaaaactagttccgtggaatatatttaatgttcgtctatacacaactggctgtacgcattcctgtggaatgaggctcaattttcaaacacaagattctttacagtgtaagagaaaaagggggaaaaaatctctcagacaccatactttctaaacatttatgttcttcatctatagaatactaatggaaagaacctgaaattgcaagactggcctcacactgaatttgaaaatttttccaagactatgccagggagtgacatagaaattctttgcaaatgacatatcctcattttgggtttgcaaagccatgtctttgtcccttacagctgtcaggtgatcattactgactcattaagatatatttacttcagtaattgtccaactttcctcccaaacagcaggaatttcaggaatccagcctgggagcctgagctgggttatgggtggaagatgttggcttatttatcacctgtttggttctcaatttcaaagagatctaagaggtagcatctggggtgaaaccaaatgaaaaggcaagcaatcagtgatgtcagctgaataggttgatgaaattggcaaaaaacaagaaccagatacaaatacatctaaggcacagcagctgggtccaggactggggaggcaagggtggttgcattgcctcaagagagttcggtagatcctatagcccctcgactttactgaggagtgaaaagaatcttgggtcagtctggactagttatgagttaccaggtggaatttcaggacaccataagttagacttagcaatcattttatagttaatataagagtttttagaatattctaaaacatgtttcagaaaacacaagttatgtggtatgctaatggatattacatgaaacaggattccatggtcaaatgagttttggaaactgttaaataaggttagaaggattcttcgcaggactttggagcatctttataatgataatgtttactgcaagtcttcaagaggaatatataatttacagcattttccaaactaatttgattatgaaatctccctttttagagcattttggtgaaatacactttaagatgcatgaatataatgacacaaatcaatttgctttctgctaacaaactgcacagtatcagcataaccttatataacttttatataactcttttatagcttatatacataagttatcaaagaaaaacttaagtataacaaattatattgtgaccaacttaaccattttattcatctctcattattttcttctcttttttcaaaataagaatattttaatataaaataattttctcttttgcatttccacatactgaacttcctgtagtctgccagaaacatctatttcccttgagaaggctaatgattattatcgcaattatgcaagaagaaaaacagttaatattcagcttcaaaattccaaaataggattttgtagcaacttaatggtttataaaagcaagctttttcaagagaaaaaagatttcctaagtctttttaaccctcattaacttactgaggcctaagcctaagtaagctagatcatgcagtttcttctacacctgtgcttctaaacatttaatatacatataggtcacctggggattttgtttaaaaacgcaaattctgatccatctcaggccaggtggagcctgagattctgcatttctaataagcttccaggtgctaccactgctgttgacccatggaccacatgttgagccaggatacaccttagggaagctactccttgtatatttagctcaccatgaggcttgctgccctaggcagaaagaatataaaatgtagagaagatagaaagcccaaagttgttcactttcaacctgagggatggtataattaacaaaggaggtagaggaaggcaagatctatctcagtctcacctctgtggcttagagtcccagagattagagttatagtaaaagggagttaagggaatttccaaaaaggaaaagacttctgttcagcttgtggttgcaaacaagaaaaatactcctcaatctgcccttgcaccagggtgagcacttggcctcaaatcaaatttgatgagaaacaattaggcagagaaaaggcctcagttaactctccaaagctgccttctggtcccatgagcgggactagaagcttcccaaagctcttgaaaatcagtctggaaagtttcgcagaagtgatcacaatggaggagtcccagccagacttcatggttacccatagcatagcaagaaccaaggtgggggctaagttaacagggaaacctcgtgcaataagagcggccagatcatgggagcagagaagcagaaaacatcaacggcagacatcagtggaacacccctctgatagaacttgttgtccttggagttctccaagctgaggagcaacccagctcagcccttctgccagagagatcacagtgattccagaaaacaatccgcagttcaagaatgtcaccccaccaccaacaacaaccagccaaggtcacataagccacaccctctaatgcacccaccaccactttgcagaggcacaatgggtgaggaaaagaagagagtggataatctattcaaaagaaaataagcataaacctataaggactgtttaaactattggccgggactcactaaagctgtgttcacctgtgatttgatttgttaattacttttaataactctctgccatttggaggccatcaagtggttcatttcttttcatctaagttatccttcttgtttcatgtagcttcaaaaaactgaccttacccttttttttaaaatcttcttcaaataattttctatggatgtcctgagacattgaggaatgtcttagaaggaaataccttcttgaaagaatgcatatcccagtattgggcattaaatgattaaataaccatctctgagcttcctctaaacaagttgtcaggaagaaatatagaggtgttgtccaagaaccatcctggcatccttgttactgcccaataaggaatgtgccttcatgttagatctcaaatgggaagtgattgaacccaccaaagggattcaccaaaagcctttaaaacatccttcccaaaccaacagcagaaagagacacacaaattactgcaagacatctatgactatatacatacatacaacacagtatcctgaatcctgaagttatagcaatgctccttagctaaaagcacctcaagaagagaagaggatttttcagaatctctgtgatgtgccccttggggatgggtaatatgtcctttcctacttcaccccaaccctatctccatttctgtaagaatcactaccacagagagccactgctacaaatggaaaagaggttagtctttcaaattgctcagaccaaaaataacagtaataataataacgttgagaaacattctacactggagaaacaagagctgctgtgtcaccaacctgaatacgaggtagtgctttaaaacaggggcaccctgttttaaaggtacagtaacatttcatggcctgttacgagccaggcagcacagcaggaggtgagtggtgagtgagggagcatccatgcctgagctcctgtcagatcagcagcagccctagattctgacaggagcacaaaccctgttttgaactgcacatgcgagggatctaggttgtacactccttatgagaatctactgcctccgaaaccatccccacccctaccttccatggaaaaactgtattctacaaaactggtccctggtgccttaaaggttggggactgctgctttaaagagttatattggaagggcatgacaacttttataaaaaattgaaaagtgggagttgaacaatgagaacacatggatacagggaggggaacatcacacaccagggcctgtcacggggttgtggggtaggtaagggatagcactaggagaaatacctgatgtagatgacaggttgatggatgcagcaaaccaccatggcacatgtatacctatgtaacaaacctgcatgttctgcacatgtatcccagaacttaaaagtataataaaaataaaataaatttcttaatttaaaaaaattgaaaaggacatattctagacaaatgcataagcaaaggccaaacatgatctattatttagagagatgggatatacaaagaaagtctacccactgagtcataactaatttctagaccacaattacagtgataatcaccagcccattagtgggtagaagatgtatcacttgtgtccttcattgtataactgcatagttaactgtacttggttctcattacagcattctcagaaaaaccttttatcatcttttatatatccagacaggaactgactacattctatctattcagaggcaagattatggtgccccagctggaaggaatcaggcactatatcttccctagcaaactatctaattggaagctacctatgtcagatgcaagtggcatcaatacttacttcctcaagtaaatgatacactgctgttgtttaaagaagctggactctgttgcttcagaacttgttggaaaccatccaaacaaaaccaagtttatcaaaggtcaaactaatgtctttatgccccagcccacagcatactcaaggcactctggaaacagatgagtgacctcctcacaagcctgcaaacagactgagcttttctcccttgcctcactgaatatcctccatgcctaagtcatactcatccattaaggatcatcacattccacttccttaaagaagtcctccttggccactcaaagcttcattggtctccccttttactgaaactttttgagcaagtattgattacactataattgcagtatttaatcatatactgtcttgtttgtttttaatactaaggcattttctgaaaataatttgaaaatctcactaccaaagggtttttcaaataagggattgggttccaggtttttaaataatatggttatggttttaatttgtggttctttgtcagaagcccgactgtttcctgatcttaccaggacaattacccctcagaatactgcgaatcaggataactacctctgaagaagctggtactccctggcagcccattagctatcccattccgacacactcaccgcttacccccgctcctaacttgccagcttgcattcctgacttcagcttctctcttccactcactggcccagacattgccttttctcatgggggtaggtaactgcctctgcttcaggctcagctctcctcatttaaggctaagtttcagcctgcccaaattaggtgtgtccccagcagacacacctagggtagccagctcttggctgctgttctaacctcctccttattgataaccttggttcacctggctgctattctaacctcctccttattgataaccttggttcacctggctgctattctaacgtcctccttactgataaccttggttcacctggcatctacggccatttggcagctctctgctgtcccctcctggcaatttgtggcacgatgtcatatcgctcaaggaactcagccagctgtcttaactctagttaaatcctgtggatttgttatttcaggtgacaaatggttgcttattatcacatgagaggagatgttttaagtttaactactgtttctttagcacccacttgcctatcccacattcagcgactcacaagcagctagccctgcctttattagatactagtagatctaaaagtttctcctaaaaagccagctatctataccagactgatatatacatatccatgtatataataaaaggaaatgggaaatgtaactctaagtgaggcactgaaagtcattatactactctctttttctgattcctaatccatataataacaaaggttaggtctgatggtatacaatgataattctcaaagattagtttatatgagagttgtctgataagcatgttataagttaaaattcctaggtgttacccctagaaactaattttccaggtgggacccagagttctacatgtttttttatgtggggatgggggaaagagtcacactatgtggcccaggctggagtgcaatgacacaatctgagtgcactgcaacctctgtttcccaggttcaagcgattctcctgcctcagcctcactgagtagctgggattccagaaacgcatcatcatgcttggctaatttttgcatttttattagagatgagggttcaccacgttggccaggctggtcttgaactcctgacctcgtgatccacccacctcagcctcccaaagtgctgggattacaggcgtgagccaccgcacccgaccaagatctacatttttaaccagcaccaggtaattctaatgcaagtggtccataataaacattagtctaccagccatcttctgttctattattctatttcttgattcagccaaaactacacactctgaggtttagcaatggagtaacagcctaacaaggacctggggtaaaaacaagcttctataaataagcatattttataagcacaataattatgaaagattctctacctgctgtgcaatgattgcagtgcccaaaatatgcctaacactatcatctgatgtaagagagagtgttgtaataactctctcctccataatttatcacactagaacttgccacacacagagatgagagaaataactgagtcagcaaatattttagctctcagcagacaagtaactgctgtttagaatacactgtggtgtcctttgttagacccagagacatgaaattggggaggttcatggttttcttaattgttatttgcttagccaaatgacttatcagactaggcctcctaatattgttggagtaaagaccaaaaaagaagatatttcagccagcttcacagcagctgaaaatgtagtttcactgcatttcaaatatagtgcttggttagcaatatttctcaaactttaaggtgtatttggatcaatagggctcttgttaaaatacaaattctgattcggcaagtctagggtggaggttgagactgcaatttcaacaagttcctgggtgaccctagggctgctagtccacagaacatatttagagtagcaaagctttctttaggtttctgctgtaaaggcaggctgcttaccttgtaatcctgatgttaccacttattgaccatccaatctggggcaagttgtaccttgagccttaggtttttttaatgtgtaaaacagtatatccttcaaagggttattgtgaaatttaaagaaggaatggctgtaaaactcctagcaagtgaaaaacttctcataaatgtttatcctttttgctatatgaccacacaacttcatgtgacaccagtagcagattatgatcactgttttccaatattattcccatcctccttcctggatcatcttccaccttgtgtctacagtcttcacagccccgaactatcttctcttattggcacaataggagaaagagaaggcaatgtgatgaaagcagaaagagagatttgaaaatactatgctgcgggctttaaagatggaggaaggggccacgagctaagaaattaagctctagaagctggaaaagacaaaaagaattctcccccagagtctccagagagagtgtggtcttgccaacaccttgcctttagcctagtggaaatgacatgaggtttttggactccagaattatgagagaaaaatacaggttattatttaactttgactcgtcactatattttttctatttttctatttctgggccccacctagactgcccttttttattcaccccactaaaatacaaattccataaggacaatggccctatgttattacctgctctatcttagtggctagaacagcacctggcacatagcaggtgctcaataggaagttgttgaatgaatagattagagccaccttctcatcaacccctgacttcaagagactgagtccaattctttaagctcagcattattcttgttgacccaaaactctacactagagatgcagctggattccgagagtgattacaagatcagtgaatactggcgaaaccatttctgatttgccactagcaaaacaacatgaaggaaaagtgatctcttgctcttaaaagcagcaaatcgttattggaaatgaggaagaaatgaatagttattgatcatagatgaggaaactaaatctaagagagcacagaataaggattcttctattcttcttcaggtttgcagtttttactatctaaacggttcctctcacatgtactccctgaactaccaacaacacatcaccaaggaaggtgtggaaatacaaattctccagccctgccaagacctactaaccagaaactctgggggtgaggctaagaatcggtgttttaataagccctccaagccagacgtggtggctcacacctgtaatcccagcactttgggaggccaaggctggaagattgcttgaggccaggagtttgagaccagcctggccaacatagcgaaaccccatctctacaaaaaaaaaaaaaaaaaaaaaaaaaaattagccagacgtggtgttgtgatcctgtggtcccagctacttgaccacataataccgaacagataccttaaggcctgaacaggctaccagagctaagagagatcacaaaccgcaggaacactccgagaggaaaaaggcaagagatattatcttgtgaggggagagaatacttttatatttattagtttatgaagggaaatagaggtgaaaagtgaaagcttggcaacagaagagatagatgttatggttgaatgtttgtgttcccccaatttcatatattaaaatctaatcccctgagtggtggtattaagaggtagggcctttgggaggtgactgggtctttagggtagagccctaatcagtaggattaatgccattatgaaagaggcgtgggggaacttgtttgccccttccacctgtgaggactcagatagaagacaccatctagaagaaagggccatcaccaaatctgctggcgccttgatcttaaacttcccagccttcagaactctgagcaataattttccattgtttataagtttgtaaggtattttattataacatcccaaagagactaagacaatatactttagaacagaaaaggaaatataaaatttaaggaaacatagtatctaagagtgacacaaaatttgggattttcattaaaatactcctgcaaaataaaggtagtagagagaatatatcagataagataaacaaaatgttggcaaatgttcaagcagggtaataaacatttattacaattctttccatatttgcgtgcatttgaaattttttcataataaaaagttttgtggccaggcgtagtggctcacgcctataattccagcactttgggaggccaaggtgggcagatcacttgaggtcaggagtttgagaacaccctggccaacatggtgaaaccccatctctactataaatacaaaaatcagctgggcatggtggtgtgcacctgtagtcccagctactctggaggctgaggcggaagaatcacttgaaccagggaggtggaggcttcagtgaaccaagatcacaccactgaactccagccttggcaataaagtgagaccctgtctcactttctataataaatatatatatacataaaatatataaaaatatgtcatatatttatatattttaactaattatatataattattttatatataacatatttgccactaataaaacaacacgaaggaaaagtgacctcctcaggcatatttacataatatctattgtacagaaaatgtatatataatacagatataatatatacctggtatatattatataatacagatataatatatagctggtatatattatataatacagatataatatatacctggtatatattatataatacagatataatatattccttgtatatattatataatacagatataatatatacctggtatatattatataatacagatataatatataccaggtatatattatataatacagatataatatatacctggtatatattatataatacagatataatatataccttgtatatattatataatacagatataatatataccttgtatatattatataatacagatataatatataccttgtatatattatataatacagatataatatataccttgtatatattatataatacagatataatatataccttgtatatattatataatacagatataatatataccttgtatatactatataatacagatataatatatacattgtacatattatataatacagatataatatatacattgtatatattatataatacagatataatatatacattgtatatattatatgtagtatatattatgtataacatataatacatatattataatacataatacatatatacattttatatattgtacagaaaatgtatatataatacatatataatatacactttgtatatattatatattatgtatgtattacatatatgtataatatatacattgtatatattatgtatatgtataatatatacattgtatatattatatattatgtatatattatatatgtattatatatacattttctgtacaatatataaaatgtatatatgaaatacatatacatatataaaatatatacatatataaaatgactacatacagtatagtcatagtgcttaaatgagaggtaagaaagaacatatgaatacttcgtcctgctaagggcatttgttgaaacaaggaagaggctatatgttccaagaacttataatgcaactatcctatggtcttaccatattattaataactgcagtttgtatcacctataggttccaggatgctaacaagataacccattgtctctagaaaagaaaaatccccataatctcacatttagcattgccatgtaatatttaagtgggatatacttatatttttaaagtattcattttccaaaatttaaatttaattgggtgttctgtatttttgtttgctaaatctggcacccctacctatattctattatccaaccaaaatttgacatcatggtcacaggttaatccaagtatattttctgactcaattcatgttgcttcctagcttctctctctctctcctcttccttcccaatatattttcactttccttttctttcctggtgtctgtatcttgttaatttcctccatactaaatctacttaactcacacaaatcaatggaatattttctcaaaatgataccagttggtaacaaacctagatttaacacaaataagtaaagttgacagctcactgatgttggcattttctgaataactgcatatctttccagtaccagaaacccaaaagtcaagaatttagaaagattgaggaagaaaagtaaatgaacagaaaagagagacccagtccagccctaaatcttctcacctcttgtcagagagagaaatatttttagtttagctgtttacaccttgagaagggaatctagatagtcattttttaaaaaacaatttttattttgtaaaagggacattaaaaagaagtcaggagaatcaagagtaagagatattaatgtacagagcccttttgctaacattttatgaaaacaaaagatttcacaagtgttcttaattagtcctcaacctctgtaggtggtgggtggcataacttattatcagagatttacaaagagaggaacatgctcagcagggtgaagggactaaatggaattctgatattaaggtttagagtgtaggaaaactgagctttggtgctaagcataggactcgggccttattggacctctgtaattactggagcagcttggtgtcaggatgcatcagctggggatcttttgtttgcaagtcacggaaaccatgaaaaacaaggaatttactgggtctcacaattgaaaagtccaggagtgacttgctctaggggctgaaaccatgtcaccaggtcttgggtatttttctctctgtctctcatctgtaacatcctctgcactggcagctctacctacagaacagactgcctttatggttttcagttgattacaaaagctccagctttgcatgctttcaagttcaaggcctgcaggaagtaaacagacaaaagaaaagatccctttcccaaaaaaatcaggtaaagcctctttgagaagcattggctgcgcttgaattgtcactctgtttcctaatcaattactgaagaaagagaaatgcagttgtctgattggcttagcgccctgatccaagtatgaaccatcccaaagcatatggcctgaaacagggtaaactcaagtgactcctcaaactcctctagtgcacttgctttgtaatcaaacttttgagttttgagaagtggcacaaccaactggaatttcttagagcaccagagttctaagcttccttctagccttttcttaggtagatcaacctacctcctatatatgaggagaaaaatactctttggactcccttcagaagagtgagtacctgtgatatcagttcccagtcctcagaaaaatactcagaaataagccagcgtaagaaggctaaaggaaagactggtgatatcaagaaataacacatccaaagtataccatgagcattcttcaaacccaggctgcaatgtactgctgggagccctgactgaggactcagtttcctctctgcaattctgctctataatgactagttacaccaatgtgtgaatccaatgattgtatagaaaatacaatttttttaatccatccatgatctgtgtccctcttcttctgattaaaaaaaaaatccaacctttccttagataactaccaactcccaatcttagtggtttgaatgaggtaggaccaactctcctagtccagaaatatgcaaagactgaaggtccagctaaatagagaatttcatggtcaatgctacaatgactggttcagaaataggccagtgagacttcatcacaggacttttgctggaactatccagaagaaaaacttccttttgtcctaggattgccaagaggacagtgagtaaacttgaccaacttgccaccacatgtagggaatcttcctgaaaacaatcttaacatagagaaaacagatccaagaggagagaaacagattcctgataacatgacttgggatagatggatccagccatgtttaaagccaatacaaagcctaggtttgtcagttaagttactttttttctaaaaccagtttgagttgggtttctctcatgtgcgacggaaaaagacacaaccagggccactgttagcctattcacacctacaaaagaattagaagaagaaaaaaaaagtcctagtcgggtacagccctgtgggtttaaggctcagcaaattgatggaacatttgtgctatcaacctgaaataatcaaaaggatcagaatccatttttaaagagtttattcaagtgaaaagctggtaatggtcatctggtaaacacagactctggagaaatgaggtcagtgctctgcagttaaaagttagggttttgcttacacaggaacaaaacaaagaaatttaacagggttacatttcttatatgaggctggtttatgagttgcaaccattgaattagtgacagtttgttttcttttccatacagcttgtttgtatttccttttcaataaaataaaaaagtatacttaacattttgtcttagacaatgtgataaccatgaagtatttgtatgagaggtaagaggaaagctaatctgtaatgaagatcaacagttagagggaaggggtctgccctggtgccctgtagctagtcacaacattttacaaaacaagatagttaaggaagaaggctaatctataatcggagaaacaaaggttaaagctgcctgggttacagctgcctatcatgtgactcaggccccataatcacatttctctaagactcaaaataatttaaagttccaacagtttcgatttttatttattttcacagtcctcattagaaaaacttccctttcctctaggcacatgcaaccccaaccagggtgttctatggcttacagagtgggagctggattttagccactactgaccctcagctggacagctttgtgtaatgctctaactggatacatttatgtggcagctggagacttgttagcatacaaaaaactcaaacttattaactcaaattattatcttattgacaaaggcatttgttgttaggacatgtcacattcaccaagttaaaaacaggcaataagggaatgaccaaatgtacctgttgtcaatccctacagtaagtactcaataaatggctgaattttataattaatataagttcctttcaatatcaattcaacctagattaagtactgaaaaagattaaaagggctatttgtctggtgtagagtacagaatacctggacaaagacaaaggtcagcctctagaatttgccagaaatgggccagcaaagtgcagcatcttaataactgagtgatactggcaggaagatttctccaaagactaactatggtgttttgaaaatacgcctgtaaattatttgacactcatcccttcaaaaggtggggactaatttctgtccctttgagtgtagactacccttaatgacttgattctaacaaataaattgtgacagaaatcatggtttatgatttcagggactacatcctaaaaagcatgtcttactctctcttcaatcactcactgtaggggaagctagatgccatgtcatgaggacactcaggcagtcctatggggacatatcgatggcaaagagctgggtcttattgacaatagccagcattagcttttcaaccacatgagtgagccaccctggaggcagtacatccatccccagccatgtcttcatcccttcgatagcttgactgcaacctcatgagagacctcaagccacaatcacctagcaaagctgttcctgaatgtcagattctctgaaactgtgagataataagtgtttattgctgctttaagccagtaagtttggggagtaattttaatgcagaaatacatcattaatatactgactaaagagcaagagtccagctactaagagtaatgaaagagccaggcagaactccagctccagaagaaatggggcactgagctaggaatgaaggcaggaactccagatagaaattggggtaaagtcaaagcaagaactacgcatttgactgagtcctagaagcagaggttcttctatttctcccatgctgtagagcccagggcagtactgagcgtgaaagttgggctggtaatgggcaaatcctgctgcaggagttggaactcagtagaaatattggcctcctggtccagctccagaaagactgaagtcccaggagataaactgcaccaaaataaattggagcaagcacgcagataccaaggagcaagccaaaatcacattatatgtcagaaccaacatcttagaatgaagctaaagatgagctatcaaaatcagagctggagagcaatgcatagttgagacaaaacaaatagtaagagctcagaatgaaagctagaagaggggggaatctgaattaggcaggactccaggagctggctatgcgaggagtgactgggtaggtctggttaaagtttcaagatagatcagcgtttctcaaactttaatgtgcatccagtatcacctggagggcttttaaaaacacatcttactgggcaccacgcccagagtttctattcagcagctcttgagcagaaactgatcattagtatttctaaccggttccaaggtgatgctgattctgctaatccactttgagaagtactgagctagattatagtaggatttgggtagaaaggctgggatcattcaggggtatgggaccaagtttgtcacaacaggaagaatgtgtaaaggaggtatctttgagcagagaaccattcatgtcccctgaatctaactagacatctgtgtgtcttgtccctacaccccccttaatatttcttaggccccactctctgctactcctttcaccattgaaaaagacgtcactgtaaaataagaattgttatcacttacaaggcaattactatgtgccatgtactctattgacatgttatttagtaaagggaatattattatccccaatgtacaaataagaagaatgcaaagctcagtaaagttacttagctgacctcagatcatttcagggagctggaataaaactgtaaagacttcctaattgtgttacagtgaaagaagtacagtcctttgtaagcaaaagtccaatttgccccagaataaaacaatccataaggtagcaaagtaccacatactgagctttagtagtcatttattttcaaagagagatgagacagagatagtaacttgtttaatgaaagtttggatgcaattcattttcttttaaagtagaatattatcgagaatcctttgatttttctctaaggacccattctacaccgcaatcttcaaaaaacattaaatagaagtcaggggaaatttccatatggagtatttcttttccatcatgtgtacaaatgatccatctgtggcttattaatttgtaattctgacccatgggacaaagctcaactagctctgtttagtgctggatcaattacagttggataaaaaagttggaaacagtggaaatatccaatatgttaatttcataaattttgttaattcatgataaatatcatgtagcatttaaaccatatagtttagaaaattttcagaatatctaatgtcatgaataggatatactattacattttaaaagtcagtttataactcttttaaaaaaaattatgtcttttggcccagcatggtagctcacacttgtaatctcagcactttgggaggccaaggcaggaagatcactcgagcccaggagttcaagaccagcctaggcaacatggcaaaacctcgtctctacaaaacatacaaaaattagccgggtgtggtggcacacacctgtggtcccagctactcagaggctgagatgggtggatcacctgagcctggggaggtcaaggctgcactataagccatgatcatgccactgcactccagcctgggtgacagagtgagactctgtctcaaaaaaaaaaaaaaagaagaagaagaaggagaaggagaaggagaagaaaaattttatcttagatcttaggctgatgtcttggtttgggttcccatagatccaaaccccaagtcaataattcaagtgcaactttatttgggaggtgaccccagaatatactggtagagaaagtaaaatggaaagcaacccatcaagcttgcattattatgcaaattatactgtgggaaaccagacttaattccactgaggaactccagggcccatctagaaggtatcacagctcagagttatcccacaaagggtgtaaggaatctgggtatttaaacaacaatttctgtcagtcattgttggaggtatgctcccacaggccattaattctctggcacattcagcttgccatgaatgagtgcagaataggctctggctgccagaaaaacccttgggaaaagagatgcagaaactggcagttggaatcccgccagcgtgaagtattgtggtaaatgctaagaggaaaattggcagagcatccacagtgtctgctacacctgagtacccccagaacctagagcttgaagctgaagcttatgtgctatattttttcagagagtgcaatccctgggagcaggagttaggtaaaagaaggtgcagccaaaaaacagggttaagttagctcaaggttgtatttccaagctggccatcacgtgataacaagcgcaactgattgcttaatctcataaagctccctctcaagagagtgtatgatatactgcatcccgggacaatctgtcccaaggagaagaatttacccctcaatgtttgtatctcattggtgaaaggttttccccatggtgcattaactcctcaacctttccagattccgcatgtgggacaccaagtgggtctcatggattcacacacctcaaatgcaagagggaagccaagagtgggaggtgagtggcatccagtgcgggcaggaggtaaaggacagtagggatttttgtctgtgtgcagtttgtagagcccacacatttggttactcactgacagccagggaagaattggtggccaaaggccttagaaatagtcaaggccaaaaagatttgacatgctgcttaagataagcctgatacatatgtattccaatttttgttaaatatttacacacaaaaacaacccactcacattcacgtgcctgaacacaactacaaataaaaaagacaacagttaaaataaaaacagtgatttagatccagtcaaattgtattttttctacctatattctttgatgtatgtttaaagttttatacaataaaggtattttgattttatagtgggaaaagatcacaaaatcacatggacaggtttagaaaggaagacagagcagtaaacactttttttcaaagtaaaaaaaaatggttaaaaaatgattctgtgttttacttcataggcatagacaaggtagtcttcatttcaaggttgaatctttcaaaaaattgtttagaaaaacaaaaataagttgctttttaaatatgagatgcccaattcttgtctcataataaattaccatagtttctaaataatttgaaatatatttgtttatacagtcacatgccacataacaaagtttccatcaacaacagattgcatgtatgtcagtggtcccatacgattataatggaatgaaaaattcctattgcctagcgaagtcatagccgtcatatcattgtagggcaatgtattacttacacatgtgtggagatactgggataaacaaacctactttactgccagttatataaaagcacagcacatacaattatgtacagtccataatacttgataatgacaaagcgctatgttactggtgtacgtattaactatattatactttttattgttattttacttatttatttatttattttgagacagagtctcgctctctcccaggctggagagcagtggcgtgatctcggctcactgcaagctccgcctcccgggttcacgccattctcctgcctcagcctccggagtagctgggactaaaggcgcccgccaccacgcccggctaattttttgtatttttagtagagacggggtttcaccgtgttagccaggatggtcttgatctcctgacctcgtcatccgctcgcttcagcctcccaaagtgctgggattacaggtgtgagccaccgcacccggcctttttattgttattttagagtgtactcctacttatattaaaagaaaaaaaagtttactgtaaaatagcctcaggcaggtccttcaggaggaattccagaagaaggcattgttatcacaagagatgacagctccgtgcatgttattgctcctgaagactttccagtgggacaagatgtggaggtagaaaacagtgatgttgacaatcctgaccctgtgtaggcctaggctaatgtgcatgtttgtatcttagtaaccaaaaagtttaaaatgttaaaaaacaaacaaacaaattgactctgtgtggtggctcacacctgtaatcccagcgctttgtgaggccaaggcagaaggatcccttgagccagttcaagaccagcctgggcaacatagtgagactcagtctctatttctttaaaataaaaaaaataaaaatttaaaaattgtaaaaatttttaaaagcttacaggataaggatataaagaaagaaaatattttctacatctgtacaatgtatttgtgttttaggctaagtattattacacaagagccaaaaagtttaaaaaaaatttttaaagtttacaaagtaaaaaagttacagtagctaaagttaatttattattaaaaaaataaattgttaaaaataagtttactgtagcctaagtatatagtgtttataaagtctacagtagtgtacagtaatggcgtgggccttcatattcacttaccactcactcagtgacttacccagaacaacttccagttctgcaaactccattcatggtaagtgccctatacaacagtagtattttaatcttttatatggcatttttactgtgtctttcctatcttaggtatgcttagatacatgaatatttaccattgtgttataattgcctacaatgttcagtacagtaacatgctgtacaggcttgtaacctaggagcaataggctatcccgtagaacctaggtgtgtagtaggtttgtgtaagtacattgctatgatgtttgcacaatgaataagtcacctaacaacacatttcttagaacctagccctgccgttaagtgatgcatgactgtatatcttgtgaaagaaaaatgaactctcagggactccaaactcactatgccaaagggaaaagttaagcttgggaactgagtcatgcaaaactgtctcccattttgtttctaaatagatagctccaaagacagaagttcacataccaccctaggaggcctcccttacaatttgctcagaaggaaattccttgtgggtcccaagatctttaccttaaaacagtgttctatggaattttaccctgacaatataaatcagtgttgtctgtattttcacaggtacaggacaaagataggactagaagtcatccctctgctcacctgagacaaatgcatatttgactgcttcctccactctatctttacttcatcttatgtaaaaattcatattcacagagcaagagatgaatgcatagttgactatttctctaccccctcttttcacatgtaaaatgtgaattcagtgaaccctgcacaaagcctcagaggagtgcaagcacttgcctcttacctactctccttccctttttctgtcctccttcccctactgcctgctctttcccctttaaatactgaagtccctaaatcctctttgaaaacagcacagatcacagatgttactgtgattttgtgttccttttgcccaggcacatcctcaaccttggtgaaataaacctctaaattgattgagactcacctcagtcattttctatcctcagcaattttcaagtatacaatacatttttattaactataaccacgatgttgtagaatagacctgttgaatttttcctccagtctaagtgaaattttgtatgctttgaccaacatctccacaacctaccccaccaaactgctctcagcttctagacacacacattttctttttttattttttaacttaattttttgttgttgttgttgttgttttttgagacagaatcttactctgttgcccaggctggagtgcagtggcatgatctcagctcactgcaacctctgcttcgccatgttggccaggctggtctcaaactcctgagctcaagtgattggcccgccttggcctcccaaagtgctgggattacaggcatgagccaccgcacccagcccttaattttattttattttaagttccaggatacctatgcaggacatgcaggtttcttacatacgtaaatgtgtgccatcattgtttgctgcaactatcaacccatcacctgggtattaagccccgtgtgcattagctatttatcttgatgctcttcctccccctcgccctgacaggccccattgtgtgttgttcccttccctgcgaccatgtgttctcattgttcagctcccacttatgagtgagaacatgcagtgcttggttttctgttcttgtgttagtttacagaggataacaacttccagctccctccattccctgcaaaggacatgatctcattcctttttatgactgcatacactttcaatactaagtcataacactcaaatggaagaccagatttcactatagtctactcttactgcagacccttttcttggtctgggatccactaaaacctgacagtcttatgggttattgttatctggtaaatataccagagaagcacatcaaaatacattgccaccaaaatccaaagtgtcccaccaagcaatgggccttgttctgtgtggtgagcagtgtaaggcatagctacatctttcactttagaaggcatatgccgatatgccccagatgctggactcctaaaagttttttctgtttgtttgttttttgttttgttttatttgagacagagtcttgctcttgtctcccaggctggagtgcagtggcaccatctcagctcactgcaacctccgcctccctggttcaagcaattctcctgcctcagcctcctgagtagctgtaattacaggcgccagccaccacgcctggctaatttttgtacttttggtagagacggggtttcacatgttggccaggctggtctcgaactcctgacctcaggtgatctgcccgcctaggcctcccagagtgctgggattacaggcgtgagccaccacacccggccctaaaagttttaccagtgtagcagaaccttaaatcgttgcagccttatcttccacccctgatgtgatatgaaaaaaaatggcacattatccttgtgacagcttttctaaaaattcacaaccccagtctaatcatgacaaatccaaagtgaggacattctgcaaaatatttaaccaggattttttataaatgtcaaggttaaaagaaaaatgacaaaaacaagaaaagactgagaaactgtcacagtctgaagaagactgagacattacaaagatagcaactaaatgcaacatggtatcctggattgaatcctggagcagagaaaaaaaatagcagaaaaaataaactggagaaatctgaatagtctgtcatttggttaacagtgttgcaccattgcatgcctgtatcaaaatatctcatgtaacccataaatatatacatctagtctatactgacacaaagtaaaaataaaactaaatggtgttggaccagcatgtctgttttattttattattacctttaatggacatataataattgtgatacagtgtgatatcttgataaatgtatccagtgtataatgatcatattgggggtaattagcatatccatcacctcaaacatttcatttcatagttttgataaatataccatgattatgtaacatgttaacatgttacaaggtaggtaaagggtatacaaaacctctctattgctatcttaacaattcttctgtaaatctaaaatttacagaatttataaactcttccatgaaatctaaaataaattttaaaacttgaagaaagggagaggaaaaagtgcctggttaataagattgaatatacaggaaagaagagataaagacacatgtaagaaagcacacgtgtgtgtgtatgtgtcatggtttatgactgggtttgtgtgtgcatattagaggcagggtgagtttatgtgagatggtagctctgctataagggaactagtgagccaaggcacttgcatgaacctgagagtaagtatctgcttaaattttgagccttacgcaccttgcttgccttaccctagtccaggatttttaatgaagctgccaagaggagcaaaagtatgtcatagggggcacctggatttgaaccagggacctcttgatctgcagtcaaatgctctaccactgagctacacccccttgatgccaataaccttcaaaaaaccatttattccatttttatgacctgcaaaacacctcataaatacctttggtgtctaacattcctttcgaatttaaactcatccccagtttcctcctagccgtaccatcttttgtttttcccagagcatttatactcattctcttcccagcacctgaagctcaatgctgtatcctcagtctaatattccagctttaaaaaaatacaccaccagctgcccatagatctctgggcacgtcaatgaatgttttgagcattaggggctaccaacaagtattggacatggaggagatctgaagtgggaatccacaaattgacttcagatgttcatgttcaattctgaaattataggcaaatattatgtatttgcacatattgtatattgtgcatatttttatcagattttcaacagggacctcatccaggaccaactatctcacttcagtgtaaaaaaaaaaaaaaaaaaacaccaaaaagaaaaacaaagcaccctgaatgttccaaagcccaaaactcaattttgaacacctctgattcctattcctttgagttccaatctaagaactcaacctcgtgcatctccaagattgagcaaaagatcaaggaaatttttgtcattgcaacaaattttccctgatgaggtctgtcagctgccatggggccagggaacaagcagcagccagagctccagctcacaagctgtctgagggccccagacacccactcccagcacccgcccaatctgatgcccaacaggagcctcagatttcaaatccagtatacccaaacctaagcttatcatcttcttgtccaaacctgcctctccatctattttgctttgttgtaataataatagctcacatatgttgggcattttcgatatgccaggcatggtactaaaagttctaccaacaacctccatgtaattgttacaaaaatcctataaaataggcatgagtagtagtatacaggatggaaactgagtcacagattgattggaatatctagccctaggtcacacagctagcaggtggtagggccaggattccagcgtaggctcagactgtgtgaagagcccagctgcttaaccagctgagcagtctccttcctatcttggttggagatgccaccatcctgtactcggtcatctagaccaaaacacttaaggcaactctaggctcctcccaccctctcctccccagttccagtgaatcagaagacactattgattttatctttgacattgctcaaatccatctccacccctgcactgtcagtgccaccacctcctaaataccctcccggcctccacccccacatccaccctgtactgcttccagagcagcctgttggaaaactaagtccatctagatcactgccctttaaacgccatcacaataaacttcaagtctcttagcacaacatgcagttcttctctctgatttttacctgcctcctcagcttcagcgttatcttttggcactctccatatcacattttgtgctccagctgcctccatctgcatctacctggcttcagcttctgctgcactgtttcctctgcctggaattgcaaccatccctctccacaaccccacctccattccaccctccatctgtaagatattattcatctttgaaaccctgactggccatcagctcctccagacgcttaccttcacctcccctcctctgaacagatgtaatcgctgcctcttctgtgttactgcacctatcgcagctaggtacagctcatacactctattttcttattctatatgcctacaccctgaatgagggcaggggctaatgtcttattcaccactgggctcacactttgcatggttctggtacatagtaggtgcccagtgtatgttgttcagactgatctaaaaacagagcattgcctgtattgtgggtgggagttacacctgacttctggctccatgcctgggtcctgaatgaagttacccaatgtgggggtatttggctgtaggaaatgaacaggggatggaaggtaatagaaatccttaagctttaaagcagaaaaatgcagttccttaaacttcagaccagttcttgttcacctccctgaaaatgttctgtggataaaaccctattccttcgctttccccagggcagtgcaaagtatgggcacagtcactaagtccctggttttccttgtggccaacaggttctaaaactctataggcaatcacaggaccgtgggaacattgcctagtaggagtttgtcacaaagattttaacattaggagagcagtatgtgtagtatacttaagtcagtgagagtgtgtgctctgagttcaaatcctgaatctgccctttatagctttttgaccttgagtgaattactaagtatctccaagtctcagcctcctcatgtaaaatggaaatacaagcaaacaagtatgtgtcttgtaaaactgtggtcagaaatagaggagaaccaatgtaaagggcctagacttgcatgtactaagaatgcaagccagggacattagttattattcaatcagccatgagccatagaagataagaagtcaaagtcaatccatgttcttctgaaacaaaaacacaaatgcacagggggcacctggatttgaaccagggacctcttgatctgcagtcaaatgctctacccctgagctatacccccatgctggtaagcttgcttttatagtctatctctctctctctctctcaacattctggttctaaaaacctccagtgactcaggggagctataattagaatgttgtctgaaggaagtctgggcattacaagctttagaagaggtttattatgaaaaaagacaggactcctgaaaactaagttctcaggagccaagaaactcttcttagactggccagtacccagagccttattcctgtccaccatatctcacagaaggcaaacctcaattccaagtaaaaataatcagattctccacaaatggcaacatcaatataatgtggatgactggattcctgttgagcttctcttagctaaggctcctagcaactgagattcttattcctcttcatgacttcacagaattgagctcataactagcactccagatatttgttgcattaaattgactctggaaaaatatatatataaataacaatttgtgtgagatagcttttccaagccacaactgtaagatggttttagtcacacaaaaacagatggtcagtgagttacactcttgtgtaacataacgtccctgaaatttggaatattgccaactttgaaaggttatttgatgaagagaaacaacactctagatgagagtctcttaatcaaccaagtaaataatttatcctggtccagccaccaaagattcattttcaacttctaaacacaaccacagttacagcaacctatatttcctgacctcataaacatctcctctcaccctaataaattgtgcaggtgcttcttatgtaaatcttacatgtttgagcctattgagaagtgtctcttctgccaatttcctaggccgcatacattattcaggcatttccaagggatcctacatttgggatgatcattttgtgtcagagttttggttggttgggagcatagaagaggctcctctacctcaggctggaactgagagctaagaaaataattacaatgcatgctttgctcattgttcttttctcatgctggccatcagtgggagttgagattttaacagtagcagacgtactctgtgcttcatatcaaagaactccagtgctggaagggttttagagatcattatttcaaccacttcttttgtacactaagaaacacaggttgagagaagccaaagagccttgcttaaaatcacaagcatgtcagtggcaggatatggactggggtccactctacttagagcacattagaggcagggtcctttgaaggctcccactgcctggaacaacacaagtgttcaaaaaatgcttgtgggataaatatcaggctgtagttgtatacagggtgcccaaccatcctggtttactggagagttacccagttttagtactaaatgttctacatctcaggaaagctttcagttccaggaaattcctcagaaaattgggtattttctaaatgttatcacctactttttccattgtcacagtttttatcatttccacatacctcctatagtagtatttacttactatttgtcttgaaatcaacttactgttttttttacttagcctcatcctgaccaaaaatatccttgaaatcatgctagttgtatttctttttactgtacatcaaaatacatagacaactattaaaatatgttaaaatcatatataacatgttccatttacaacttgccattcatgcttctaaacattttacaaatactaatttatttaatcttcaagacaatccaatgagggaggaaatattatcatctttaccttacaaatgagaaaactgaagcacagtgaagttaaataacttgcccaaggtcacacagctagccaacttgtccatatatccccaaagtcatactggaaaccctcagtggtcaccatagtgtacttattaatttaatattttaacctgactgggccacagggtgtccagatatttggttaaacgttattctgggtatctgtgaaggtatttctggatgagattaacatttgaattagtagactgagtaatgcagattgccctccctaatgtagttgggcttcctccaatcaagttgagatccaaatagaggaaaaatgctgagtgagaggggacttctcttgcctgactgctttgagctgggacatcagtcttttccagcctctggactcaaaatgaaacatcagctcttcttgggtcttgagcctgctggctttcagcctgaaactataccatcagcaatcctgggtctccagcttgctaactagagatcttgggatttctcagcctctataatcatatgagccaattcctcgtaataaatctctttccatatgtatatgtgtgtatgtgtgtgtgcaagcatatacatatatgtatgtatgtgtgtatgtgtgtgtgtgtatatatatatctgtgtgtgtgtgcatatatatatatctgtgtgtgtgtgtgcgtatttggttctttttctctagagaaccctgactaatacacacaggatactctgggaagaatagtcaggcctgcactagttttgaggatcctgtccgtatttgttgagattgtttaaaccccataaggcccagaacagcacctgccgcaagataggagctgaactgatctgctcttatattcctaaccttctgctatcatgagatcacatatatgaatttgctctcagtgctctcaaaacataagtaaaagtaaaagttaatgtttgttttaattataaggtatataagccaaataatctggtctgattccaaagcgtagcactcaacgattttcatcagagccacaaaaaaggaggggatttacaaaacaaaacatcttgcagagatctcagaaaaattgtggcaattattcaaaatatgttcaaccacaggtttcagaaactgaaacttcctaatatttctagattccataaaactaataatggaaactagaatttaagtttttcaaagcttctgcacagcaaaggagacaattaaaacatgaaaaggcaacttacagaatgggataaaatatttccaaaccacgtatctgacaaggggttaatatccaaaatatgtaagaactcatacaatttaatagaaaaaaaaactaaatagtccaattaaaaagtgggcaaaggacataaatagacattttctcaaaaatgacatacaaacagtcatcaattacataaaaaaagctctcaacatcattaatcatcatagaaatgcaaatcaaaatgaaatatcacttcacacctgtgatatacatatatatatgtatatatatacacatatgtatacacttggattttattggaaatgtgtgtatatatatatatatataagtatatatgtgtatgtgtgtatatatatgcataatatatatacacatacatatataagtatatatgtgtatatatacacatatatacacacatacttatatatacatatataatatatatacacatacatatatacacacatatatacatatatacacatacacatatatatacacacatatacacaaacacaatggaatattattcagctataaaaaagaaggaaatcttgtcatttgtgataacatgggtgcaacttgagggcatcatgctaagtgaaaaagttggacagagaaagagaaatactatatgatctcacttatgtgaggaatctaaaaaacaatcgaacttgtagttgtggagtaggatggtggttgctgggtgcttagtggtgggagaaatagggtgatgttggtcaaatggttaaaaactttccattataacatgaataagttctttggatctaatgtacagcattgtgtctataggtaataataaatgctgtattgtatacttgaaatttgcttagaaagtaaaccttaaaggttctcaccatttttaaaaatggtaactatgtaaggtaatggaagtgttaactaacttgattgtaataatcatttcacaatgtatatgtatataaaattataacattgtatatcttaaatatatacaattttatttgtcaattatacctcaatgaagccaggaaaaaaattaaaattctcagtaatcagaaggattttccccttatatcaagatattgctctcaattgaatttttttcactttttaatccaaagtttactcaactgtaaaatgtggatgttacaattagaagatctactaaattatttctaatcctgacaattaatgactcacaaattcagatgttaccttctcatggaggaccgagtcagaaagtacaaggatggccaaataatggcagaacaaaatgattaaactgtgtgagagttttcaaatacaatcccacattaaaaagaaaatatgttcttaccatggccacaagattcaccctcaaccttactaccttaatttttccccatattattttgcacaaaatatttgttcttataaatgcctttgtcctatgaaaatatgatcaacatccctaattataagtaaatgcaaattgaaaccacaatgagacatcacctcacacccgttagaataaccactatcaaaagaacaaaataacaaagattgttaaggatgtggagaaattgaaactcctgtgtactgttggtgagaatgtgcagttattatggaagataacatggaggtttctcaaaaaattaaaaataaaattaccatatgatccaacaattccacttgtaggtatcatccaaaggaattcaaagcaggatctttagaggtagttgcatatctatgttcatcgcagcattattcacagagccaagaggtggaagccacccaaatgttcatcaacagattaatgagtaaagaaaatgtggagtatattcacaatggaatattactcagcctttaaaaataaggaaattctatcccatgcctcatcatgggtgaacttcaagttatgccaagtgaaataagccagttgcagaaggataaatattgtaggagtctaaccatatgaagtatcttaagcgtcaaaaccatagaaacagaaagtagaaatgtggttgccaagggctagggggttggagaggcaaaaattaatgtttagttggtatagagtttcagttttgcaagacaaaaagttctagaactgtgttgcacaatgatgtgaatgtacttaatgctattgaactatatacttaaaaatggctaatatggtaaatttaatgctatataatgttttaccacaataaagaaaaacctatggtctaatattagaaagaaattgtgtaatgaagtaaaccatctcaagaaagcagctgcatgcctattgtggaaatgacaagcacaggcacatgttatctcacttgagggtaagatactctgcaacctctaacttagtgaacagattgcgcctgattcacagaccgagacaaattcttcctttaactcaatagcaaactcaaatgcctccctctgcctgcaacagggcataccaccacctggcattctttgtttcccagatagtcatggtgtcctttagcccttttcattattcacttaacatcaaaacaaaatgcagctaataatattagtctatttttctggtcttggagaagtagcatctgaatttaggccctgtgcccagatttcccactctgttggcactgtagtctagggaagtctttcaagtttttgttaagccttcagccaggtgagaggtacatgttagttttattttattttttttaaagggaaaaaaaaaacagaacgtcccagtcaaagggcaccaaactaaattgtcatgggaaaattggccaaatgatatatttagtcaatgctttgcagtttacctctcataagccttcaggggcttttatatatgctttatatatatgctttatatacactctattatagcctggaggtcatacaatgtgctatgttttactctaaaattcactctcaaactcattctctctctcttctctcttccacttcctctttctttctctctctcaacttgatccagattttcccagggttcaagttattttctaaatgaaacaaaagcccttttacaaggtacattcaagctgctcagattactttgttctagtccagcagttacaatttcaggtagagatgtgccttgttttatgagaaagatttgttccttaaaagttactgtgtgaccaccatatcagtgagatcagtgtgtccctccatgaatgcttctgctaatttgtttcatgaaatgtctttttttctcatgtactctccctctctaagctttcctaagaattaaaaaaatagcaagcttaccaaccctttggctagtgcactgaatataagattattgggagaataaggagagtaatttaattcatggatgtggtggcttatatgaaatcaacttagctaagctggaaatacatctcccgaaattcccttctctgcatggttgtctatcagagttgcccacaagaaaatgtgcacatgtgaaggtggaagtgaagcagcagcatgtttaaaatgagatggaggtgtagaagcaggtgctgttgcattctgcccatagtcactgatcttgtggctcactttgtccatcagggcagctgcaagcacgtagttcctccacctcctactggatcttctctttagcttctctgaatcctgggccaagtttgtgaacagctttggggtgaaatgagtcagccattctgcaaatcccaacattgttggagttggagggtttggaggcattgagagactgatgtgggttccaatttatcctttctctcccccacttcatattgatcttcctttccagactgctggccttgctgacttcaggcccagcactagacacaggagcaacagacttacctatacactcaccaaggtcccacaattgcgtgagatctcatccctataataaatattttatatcacttatatggttctgcttctctgattgaattctaactccttggaagtcagaaaatgacatgcaagactgaaattctttgatttgaccaaatcctacttgtaatggctttcacttcactgtatggctgaagaggagagtagtggcatccagacttgacttctcaccttctctggagcctcactgtgagcagagaccaggaggacaacttctggcctccctcaggggtctctcttcacagtcttacccttaaccctgtctctactctgctgtctccctgtatttaccactgtccagccatgagcctgctggttcatgtgtgtttagagccacttcatatctaaaatcagatctgtgtatatcaaatcatatttttttattgcaaacatatagtttttcctttctcattaaattattaattaacagtggactctgaaaacttcagctctaagaattgctcctttatgggctgggcacggtggctcacacctataataccagcactttgggaggccgaagtgggcggatcacctgaggtcgggagttcaagaccagcctggccaacatggagaaacacaatctctagtaaaaatacaaaattagccaggtgtggtggtgcatgcctgtagtcccagctacttgggaggctgaggcaagagaattgcttgaacccaggaggcggaggttgcggtgagccgagattgcaccattgcactccagcccgggcaacaagagtgaaactctgtctcaaaaaaaaaaaaaaaaagaattgctcctttatggtgcagaggaaagaacactgggctatgaagtcaacttcaactctgatcaatcagtatgacctttgggcaagcccctgaatctctctggatcctccagccttcagctgcagagagaagaagctggagttgatgatctctaaagactcctccaacttcaaacattccattctaaataaatgagatgctttatctttaaagaagttggaagtaaatatttccagaagcaaatacttagactcttatgcatattcaaagacataccaaacatagacacagctgtatgaaagtatgttctggaatgaagcttagagcacatttaatattcagtcattgttactaaattaaccctaagtcttagcacacttatttatatagtttctgatcctttatttttgttttgataatctttttagatgtatactgcctcaatcccacttggaagtaagcgaaatatataccataaggaaataattaaaatattctagcagctctgcaggaaaactacctcaatttaaaactccttcatgatatcacctaggaatagcaaattaatgtattatattaatgttgctgaaagcaattcagctctcaaagggcccggatttacttctaggaagtgaatttggctccagaaaaaaaaaaactaagcatattttttgtcaatttgaccaagctcccatggactgaaatagttttaatcttttccttataggaaaactcccttatttatctgggtcctctaccctacctgagctaaagaatacctaagcccagtccctcattttgtgtaaggggcctgagacattaatgtctgtctactccctactataagaaccaggtccgtatgtttcattatcaccagtctctatgcccagggactgccagatccctgctccagaaccaaatccaggatccagagctctgcttcctatgaacaagtgagccaggtactagcttcctctcttctcaaatctcctagcattacctatgggtccatttctcaaggacaaggaagagtaactcagagcctagagggcagagataagaaccatgggagatcattctcagataataagtataagagcaaagtaagccctaataaaggaattagccacatgtgccttggagatttcagaattgctgtgaaccagtggctgctgtgtgcctcctactttctcactttctgaatgggagtatctactgcagttatcctattcctgttccaccactgtaggacagatcatcagtctctttaatttacaggttttcagattgagaaggatggtactcaggaagatggacttgaggaaccacactgcaggagcctcaattgcatgtggacctcgagtctgagcctgatttaataatggaatgagattgttctagaatctttggtggagtgaatatatgttgcatttgggaggaaagtaaacaattgtggtcataggacagattgtgttttaacatatggccccaaatttctttaatgtttttctcattgaaaagtaatgtccatgtttcctccatttgattctggccagcggcttaggacttctacaccaacaggctatggcaaaagtaatgctgtgtgacttctgaggctaggtctgaaaaggacgtgcagcttctacctccttctcctgggatcctagctcttggatcccagccaccatgctatgaggaagtccaagctgccacatggaaaatctgaacacctgaggctgatgtcccactatcaccagtctctatgtaggtattcagaccaacagccccaactaaggtccaacaagatgtgtgagtgaacaagtctttagatctttccagccctagctggaactatctgcctgtatttaccatcattgctgtacctgttgggggattctcccatctcatgcctcaaccaggatgagagattgcagtgcccttgggtcctgttccttttctgtcttgctgactatgcctcaccaccatcaaacacactaggctacacccaaaccctgtccttcctctcacctgctttgatttgctatgataaactgcactgccttatagctgaatctcaaaatagtacaaacacagtggtgcacaacatgactataattaggcagtaaataaggagaatgaagtcatagtctaatacttgacacttggcaatataatctgttgagatgagcctgagacgtctgattttttttttttttttggcacctaaatctaagcaaattgcactatgtctccatctccacattggtatagtacaaggaccaacgatcaatagatgacaagcttttacaaatctccagcttcacttggtagaaccccaaaccagatacaattgcctcagacccctctgtaggcaatccaggattccctatcaggagggaagtgcagccagcaacaacttcctggtcagtagctaccactcctcccacacactcagtctcctttggacctgagatctcaagccttcaaagaagtgagatgttctccttctcccaaaatgccatctggcacacagcccctaagcctctgctctctacttccttctgccaggcaatgccatcaacgcttttcttactgaaaggccatgtgttacacagtactacaataatcctcaagatactgaaagtaatgccaagtgaaagaccaagggggtgggtggagggctaatgggctggacgaaatagccacttgattgctagttcatacaagatgtggcagcaactccttttctggctggagatcttggatgtcacatcttagaatcaggtggcaaagcatctgtgaagggcaatgtggcatcccagacagtgggtggtgagatcaggaagaaaaaatggaaatcaacagatggtggatcctacagctgagaactgattcttcaatttgacatggttggcataaacattttaaatggagcttggtaaagatcaggttattttaccattgaccaagctcttggcttctaaaaggtcctaaatttttgtttcctttgctttcacgagtgtttatttgctttccaggaacttcagggaaaaaggttaagtaatggagggaggaaagagggaggggttggcagatcaaacacaggacttaaaagtcctagatctaaaccttgaaatccccagatattttatgttataaaaagatgtcccactttcagaatccagttctgtaaatagttttcagaagtcgggggacttgcaaagatttaatttgcctgacaaaaattttcattggcattttctatatttcctagcgccaccctctatgatttttaatccctaaacatctaaattaatgtggacatctgcttctagcaaatatagtcagagctgccctgccactgccaatttgcaatcataaaaccataggaataaaggaagaagaagttaaacagaacaactcagcccagcttcccggaactggggccctttgtaacttgctcccctcctcctaccccgtatcctgccccctctcaccatgtcccaatctaatgtcataattcaactgccaaatatgcataataggaaacataaaccacaatcctatttgttctgtaatcattcaaacatcaccaagtttttgtcaggacagaaaatgaaaactatgtgaataaatactgcattcaaagaacctgtacaccgccagccatttaagccacaagcttataatgaggagaatctcacactttctcgaaagggtggcactttgctcctggcctgatggtcattatgtctcccggacttggctccagctccaggccagcactgtccagtggaaatggaatgtggactatgaatgcaagctacctatgccattttaaatttcctagtagccacagtcaaagaggaaaaagaaacagactacattaatcttaataatactttttggttttttgtttttttcaatttgagagcaggtactgtttattaactggctagattacaaaaaataattgtggtaggcatgtttattcttctaataagcctgttgatctggtcttccctgttgtcagcatctccaccttctacaaaattggtggtctttttcttcattctaacttgtcgagaggataatttgaagggccacaggaagttatttgcttctttaagcattttccaacagtatagatctcatgaatcagatcctccatgcagatgaggccatatttaccaagagatcgagcaatcaaagtattatctgttggagcaagtagcttcttattcattttgctataaccacatttgtagattagtttatttactgacttcagatttgggtatgcccatgcaatatatggttctacaaacctcagcacattattgaagccctgctgagcttcacaaagtttctattgaagatttgatgaaggcaaagaagttgcaacacctttcagacctttgggctcacccaattgataacctccgatcctgatgacaaacgccaatttgggttctgcagatacatagaagttgccagcttttcttgccatcctcgatatttgaatttcagttctgtacatctgcatatattccttgtgatagtgctttgctttttcatagataagcttcctccttgcctttagaagcatcttttgggcaaacttatttctcaggcgcttgatcttcagctctgtgaaattccttcactttttcttaagggtttctggcacagcaggaaccttcttcttctcttcaacaccctccatggttccagccggaaaagagagttaacaatactttttaacccggtacatccaaaatcatttcagcatataacctatttgtaaaaaaacatcgagacatcttatagtctctttcacacaaattcttcaaaacccagtatttacacaattcagactagtcccattttaggtcctcagtaggtggctagtgactagcttaatagatagcacaggtgtatgcagataaggctgtccttatttatatggaaaagtatattcctttctaaaagaaaatgcccctcctgagttaggcaactggaaatggtaattccttttccttaaagtaagcttaccagataaaacacaaaacacctacttgaatttgaatttcagataaataacaaattatttttagtatgactatgtcctagtattgcatggaacatacttatgctataaaaattactcaatgtttatctgaaattcaaatataactgggcttcctgtatttttatttggtaaatctagcaacctcacctgaattcaactcaagtaagaaatggagggggaggaataaaatatggcagctgctgaaggcagcagcagatgatggtgcaccaggaagtcagaggcaggcctgccacgagagccactgtaagaaccaccatcattaaggttgagtaatggaagcacctgccaggaaggcacacaggctgagcagcaggtgtcactgcctctctggagcctctgcctgtgcgccttgttttctctttctctttccatgaattttacaaagatatctgcacatcctgtaagtatacacattttgcaagaccttggtgttaacatggcatctgcagctttacaatttgctatggattttccatgctaataaaaataaaattttttaggggccgggcgcggtggctcacgcctgtaatcccagcactttgggaggccaaggtgggcagatcatgaggtcaggagtttgagaccagcctggccaacatggtcaaaccccatctctactaaaaaattacaaaaattagccaggtgtggtggcacatgcctgtaatcccagctactcgggaggctgaagcaggcgaattgcttgaacccaggaggcggaggttgcagtgagccaagatggcaccactgcactccagcctgggcaacagagcgagactctgtctcaaaaaaaaaaaaagaaaagaaaaggaaaaaacatatatattaataagagctcatgccatgggtgaagagatagaagtattgagttttgtctatgcactaggtattcttttgtgtgctccaagtgagaggcgggaggcatgcccaaaacattttcctcaaattcctaaaaattccaaaacagtaacctggttagagctaaggggcataaggattacagaacttttgagaaaatgttttcttcagatggctaatgctcttggctaagatccagacagtctgatgcagtaggtcaggggtggggcctgagaatttgccaattttaacagtttcccaggtgatgttaatactgccggtccaggaaacacgctttgaaaaccactgttttagattatgagagtgtttccatgggaatataaatagcacttgttgagactttttgttttgttctatagttagattttcctcaaactgaaaactcagagaagataaactgcttcagcagtgatcctgtgggccagtggcttccttctcatcagccctgaatttccccagtctatccatctgcctcagcctccagccaatcctatgctgggtcatgggagggtgaccctagccaaacctcaaggctaccatcacccagaaagttttttgtctagccagctcagtggtagttaggagacccacttggtagcaaggtctttgggtccccagaatgactaggtagttactttcctgtccaggaggagggagctcagacatattggtcccaggcaaatgaggaagatggaactttgtatcagggcaataacaataagccgccacgagattttcagcatttaccaaaggcactcttctgtttaacattttctgactcaataccttatctctaggcaccttccatcagccttcctttccagcaggcttctgggagggcacattgttctcctccctcttttatggatttccttccttagagttctctccaagacttcccgttccccaggccccccttgcctatgccatccatccaataaggaccaaacactacccatttaaggactttatgactaaattagagttataaagaatgcccacatcaaacataaggaagccctagaggttcaaaacaccttaccacattctcctagactttgtctctcttctactccaagaagcccagttaccctttctcctctcttttatccccaaggatacagaacatcaaccacatcagccatcttgtgccctgcgtgctgagaggagcttttcttccatgaagatcccttgatgcagagcccttcattttggtaagaaagaaagtttagggcagatcaataatggtgacctaggaggatattgagcttcccctttatctcgagtgagaaacattcctcagaggaacttaaaaaggatctttgagaactaatagagaggcagcatgctggctacaacaaagacctgattttcactaagtgtctgcttagaatttcacccagagctgtggctagacaaaccctagccttgtccccaatttatagaaataaacaaattattgttaataaacctatgttgcaaattaaataaatcttaaagtgcaagcaattatttccctcttactattcttaatggggtcagctcatttccacgtgtaatagccaatgtctggaatccatttaccatttgctttagatgaaaatttctctggaaatcaaaactaatattcactttgtatattccttctcttcttttggaagggaagtgaccaggaagtcttcatgtgtcctgacttcttctttcccatttcattgttctaataaactagtatttctcctactgtggtcagtggggccactttcataagaaatacctgggatggttgttaaaaatgcaaattattggcctcatcccaaacatactcgagtggagtggggacttgcccagaaaatctcttctaacagctccttaggtaattcttatgttcactaaattttgagagccactgcaataagtactgtttatatttaccctacaagtgttttaaaggcaccaatgtccctagaagccaggggtttgacaaaactacccccactctggagctccagttactctgctgctttaattatggccaaaagcacaaatgttattctaggtgggactcaacattgggtcaaataatgcttctttgttttttcctgctatactttgccctttattatttcttccctacttccctgtcttagcatgccattatccccaattcatttcatacttattattcataattcaatcttcatacaatgacttctatgattctatgacactgtgattctatgacattaactcagctgacatttctaatcctgacaacctaactcatcctccaggttaacaacatcagtgcttgcagtaaagctcaccccttttccttaagcctggaaaccaccttgtttattcctttttacagtaggctgagctaaattgatccttgtgagtaaatcaccctaggtcttcatttctccaattacattgccatattgccctttcccacacaaacttgaaataccaagttccaccttcaaggtagagatagcttattaagccctcctttgtactggccacatactataaacacatttcaattattataactatctcactgcaatgtaatatttgtttacctctttgtttcccctactagatctaaactactcctaggcaggcattcaattaattactctgctgtctccaatatttagcctagtatctggcacaaagtgggcatttaatattaacattgagctatactactctcaaacttttatgggcaaagatgctatgtcatttaatgctgccccataaaatgctgacttcttatgccactatttattctcataaatattatgactatatatatgtaatacatgcaataatgtttactatatacagtgcatctgagcaatgaatttaatatatgtttttcttatggccagactgctggtagtctaaagcaacactgtctcctagagttctcattaatgatggtaatattctatgtctacactgtccagtatggtagccactacttacatagagctaatgagctcttaaaatgtgtctgaggaagtgaatttttaatattattttattttgattgatatcactgtaaacagccacatgtggctataatattttaatgctgtcatccagaaagtactaatgaactcaactgtgcttccttcactgtggacagagcctggaaatctagtgtttgctcagcagtggtattcccggagaggcagcagatgggaacagtcagctgaggtacagagaagaattttatcactgacatcatttagaattgctggtgctcagtgataacaaagcagacaaattttttgtcttattactgtttttaagctgtttacaatgtgcccactcattgcctgcacccacaggggactgctcccaccaataccacccttgttacaccactatctttggtcactttgtctcttcctgccctcatgccatgttccactgaaggtttttgactcatgatggataacaaaaagtttgcaagtaattgtgctgaaagtgattcaaaagtggcgaggaagattatcacactgagtattaaaacacaacttttaaagcagctcaagatgccttcaaagaaacggcagggaaaacagggtgcctgtcaaaagtagtcagggcattaccactgcagcttgggaagaatgaccaaaattgagggaatcatagcctaaaaaactttggcctgaggcatctcctaacattaggagattttaaaagaattcaagggccagacgtggtggctcacacctgtaatcctagcactttgggaggccaaggcaggcagatcacaaggtcaggagttcaagaccagcctggccaagatggtgaaaacctgtctctactaaaaatacaaaaaaattagctggacatggtggcacatgcctgtaatcccagctactcagcaggctgaggtaggagaattgcttgaacccgggaggcggaggttgcagtgagccaactccaactccagcctgggcaacagagtgagactccatctcaaaaaaaaaaaaaagaagaattcagggtagttacaagatcaattacagaaaagcgccttcagagaggttatgttctgctaacaccacctcttgctcattttgctcatttggttggtctcccagttccaggaaatcatcccatgcctaaacaaggaatgcctatacttctctatcaaccagctacctaaaccctgaacaccgatctggaaatgataaactataataaatccaatgtatagaagcaatggatattgccggctgggtggaaattcagtagtaatatgggtctcatcttctatagcagcctgtgtgcttacaaattggcctagaacataaggcactttttaatgtataagtctatttgttcccatgcaaataaattcattatatatttaagggagaaaagcttacaatatatcatgtgcaatataatcctgatgtgtatgtgtgtatgtatgtgtggtagccactaactacatagtgtatctgtatatgtggtacacatggcacgtgtgtgaatatgtactgtctatacataatcagtgaacaagatacagagggtggtagagaatgtaaccaaaaagtagcagtcagtatgtccatatagtaaaataacaagtagtttgttcccaaattctataataaatgcaatcaaataagaaatgttcttgaaaagcatagagcaaataagaaaaattgttatttttaaatgtcagtatattcaaatctgttcgttatcaaatatatcttgtaggttaccaccttatctgacagctctcaaattctcagatttaggtactagtgttttgtttgtctggcgtgatttggtttcatttgtagaattcactcatatctatctgccatgtacagctaaaagttgtttgccttggccagtataaggatttatgctcacttttatcctaaacagcttttggtcaataatcgtttgcctaatcatgtcagtaaagccgtggattgggtgcatttcctctttacacaactgctcaggaatattgcattttatttaggatgatctgaaaccatggttctcaaacctttttgaattcaaggacaagacaaactctccatagacacctgcctcatctatttctgctcatcacttttagaaactggacacttggcattgctttcaggtagacaccaataaggtaaaaagttttaagaaaccatgtatcaaattgcattataattttatccaccaaaccaaaacatagatactgtcataatactaaatgcgatagagagctgcctaagatggccagctcaatgaatcttgggcatcacccacacaccactgaaaattctgctactctggagagggcctgtgttacaggagggatggatggtaagaccagatacagcctatgcagtaaattgagatctaatgcaaacaaaaacagacctttgaattttaaattagatataaagttgtttcaccatatgagcaattctaaggcaattagaaacggaggctgcctggtcggatggttggactcgcagaacaaaataacctcgacaaactagagcactgaatgagataatcctggacatctgggttgcgctgccagctcctccactgattggctgtttgctttgggcaagctagtctctgtctgcgccttcgcttccttagctaaaatgtagccattactgcctaactttcagatttgttgtgaatatcaaatgagtgtacgtgaaagtagatatataagttattatgttcaatgtttatatttcttcgttcattctcacagaatttgggaagggaggacaattgaacaggtatgctctgtcagccatcttgaacaggcagattcattgttaatattattatcgacaggtaagaaaaaattttgtgaaaaatgagagctacctattcaggcttttcccaagatgtaaattatagcttgagagtcttttgaatcacctactgatttgccactgctgatctgctctaagtgagccttctaaacgcagtaaggaattgactctagacatcttcctaaaggaagagatcaggggaagatggggtgatggacaaatggagcaaatgaagggagggggaaactgaggaacagcttatctgcaggataaaagtagaagataacaaggctcggggctcctgaagagccagccaagaagggcaacccagacaacagagaaggaaatcaggacaaaaatgtcttactactttagtatttgggttagcccttgtctatttccctggagaaatgagcagtacaaaccttcagtttctactgaaataaatataactgaatttaaatgtttaggtttaaaaccttaatttactactaaaataaaagcaatgacaaaaatctttgttctcaaagcagcagagacctgaggggtgctgttcagctccaccaagaggaagtcagagacaagaagtgtctcctggcatgcagaaaggggtaaacaggacaccagcatgcagtgtgggagagaaaagagtgtgagagtaatccagattcaaatccagaccgtgccacttccacattatgagatctgggggtagatactgaaataatccaagtcttcactctatcactggcaaaaaaaaaaaaaaaaagcggggggtgggtaacgatgataacactgttatgggctgaattgtgtccccccaaaagttcttgtattaaggccctaaccctcagtacctctgaatgtggcctttaaagaggtaattaagatgaaatgagatcactgaggtgggccctaatctaataggactggtgtccttataagaaaaagagattagaacacagaaacacatagagggaagaccatgtgaagacagatggggaaaatggccatttacaagccatggagaaaggacttcagaagaaaccaatcccgccgatagcttgatcttgaacttccagcctccagaactgtgaagaaataaatttctgttgccaaagccacccagtctgtggtactttgttatggcagacccagcactttaatatcaataccaatgttacagagtgtttgtgaggattaaatgagaaaatattaaaaagcaagagaaaatagacactaagtggttatctttccatccctttcctggttaaaatggtgctcaatctgcaagttggctatttggccagaagagggtcaaatcaacaagggaccatgagacaacaaaagttcaacccatgaggctctgaactctaaaatctatcattgttacagattctgagtaacctaagaaacacattagtgcagaaacgatttcataaaaatattatttcctactttcagaagttataatagaatttttgtgaccctccaaactgctggttttctaaggtctctcaaaaaaaaagcttatatatgctatttgtttctatagatgactacctgactgagacataaaaaagttcatatttctttttttttttttgagacaaagtcttgctctgttgcccaggctggagtacagtggcgcgatctcagctcactgcaacctctgcctcccaggttcaagtgattctcctgcctcagcctcctgagtagctgggattacagacacacaccaccacacctggctaatttttgtatttttagtagagacagggtttcaccatgttgggcaggctggtctcgaactcctgacctcatgatctgcccccacctcggcctcccaaagtgctgggattacaggcgtgagccaccacacctggctgaaaagttcatatttcatacctatacccaactctgtgactccaaaagtagaagcaagcccatcaactgcccactgtttggtccttcgaagtaactgagtagccaagagtctcacttcttagttactgtgcatcgtacttaacgattcagcaggttttcctctcctaaaggccagttcccatagacgtccaatagatggcactaggtggctacaagaaataaagtttctttaaggaaaaaaaagaaacaaaaaacaaaaactttgtactatagaaattttcatacaaataacaaaactagagagaatataatgaacttccatgtacccatcagccagtatcagcagttatcaacaagtggccaatcatgtttacttatcctgcccactagattattttgaatcaaatctcagacatcttaatgtcatctatacataatttttaataatttgataaaaagtaagggcaagatgagcaccttgatcaggctataatctgtcaaaatttttatttgtttttttaagtcttgaaagtttaattcacaaataatttttttaatgagcaatttatagtgcttcatttcagtggctcttaaagtactgcaattcattattttttcttcctcaccaaacacccccttttaactcccagcccttgtttcttccacctctaccattttcatatcctcaggctccttaagcgatcataaaataaaaactttacttttttttttaactgattttgtttaggcaacttacagttttgtcaaagttttattacatatagttttcctgttgtttataatgaggagcgttaagaaacaggtcagtgaaacaattatatttccaactaaactatagattttgttcatgggaagtttttaggtgagtcttgtgtttaaaaacaacaataatgataatttttcatcctaagggcattatgatgtactctccataattaactgggttctgactcaatttcacattcaccacaaaccctgaccacacattcaggctagagaagcaggggctataaaacagcagacctcaaagagcagcatggggtgggaagaaactggacttggagaagatatgacttgggcccttgatctgaccacctatcactacaggacctgggacaagtcacttagcctctctatgcctcagtttcctcttctgcactaagggaataataatacctactcaacttatctaacacagttatagtagagatggagggagatgattgtgaaagcgcatttccattcataacatgctgcacgccctcatgaagttaggcaacatggtgatgcagagcaggggttcaggtgtcagacagatctggatgtgaatcctagtgatgcgtgatcttggacatgtggctttacctttatgaacctgtttcaaaacctataaaataagtataattacagaacacgtgtcatggagttattttacagattaaaaaacacctgtaggtaaagcacttagcagagggcttgatgtatttctaggataaagaacctcagaattacagaagccaaatggactttggagaatgtttcttaagagaaccctttagggctgctcattcaagcttatctctgtttcctggcatcaaactcacccccgagcttccttaaacttaactggctccttggcccaatgtggccttcctggggtcctttagaccaggcctcacctccttgatggaggttttaattagagctgtacttctggagctaaaacaaagacaaactgagctcctgggatgaaggtcagggaattcatgttctttcctcagccttcttgttatcccatgggtaacttcatgcagtcacgtccagatgttgcttaaggaaaatggctattgctgctgtgccacagacagtggtgagttatgatgccaaaatgcagtgactcacttgcttcctaataccattcacctacatgctgctttatccatctctagagaggctacagctgcgtgactaggggtttccccaagcaatttgcctcctcagtctcaagtgggaggaacgtgggaagaagcagatgccttagaataagtctggtctccattctcacaaaagtctgtgggattcgcagtaagggaattaacatcaatctgatcttattatctcatctgccattttaaaatcagcttcccactcaagtgtgatattttatactgttgattctcttaaaattgggatcttaacaaagaaaagcttgcaacagatgcatgactactgctcaaatcatcgctgaggcacttagagacccagaaaagatcttatgtttggcttgcagtgtttctaagagcagtggaatgagggagggtttctttgcatatttcctgtgtaaacaaacttacaccagtaaacacagccaccttctcatcttctgtgacagcagccaaaactattagccacagccagggcttttgatattcatacaaaacctaaatgtgacatgtaaacaggaagagagagatatagagaggtaattaccctcttataaggagaggaaagatggaaaggtggtcaccagggatagcatctctctcccactcacagaagaaaccctagcatttcccaaacctatctgaccaaatgattcagtaagttaataaattacataataaatgacaaatgatacagcatgttaacaccgagaggggactccttggtaaaaataaataaataaattcaagaaatattggattaaagaagtcactttactgcaagatttatcagagtctctagtatatgtgccttataacactctaagaaagccaagtgtgtctgaagcatttcctaaatatattttaccatgaaaccctttacgtatagattatgtaagaaatggggaaaagttccctagacctatatggtttgaaatcctgtatgttcaaagggttgcattatcccacagtaggtaaagatccaaacatggaaataagcaaacctgttttaggtgaaagagtttgcattctggatctactaattgctagctaagtgcctcttggcgcttgttcctttgaaacacacactgtcatgaacttgccatccctctcagcctcaaactccagttgccattaaaggcagtagtctataaccatctgttatgggttgaattgtgtccctctaaattcatgtgtagaagtactaaccttcagtacctaagaatgtgacactatttggagacagggcctttacagaggaaatcaagtaaaaatataattagggtggggtctaaaccaatatgactctcctcctcataaaaaaggaaaatttgaatacagagacatgcttagaggaaagacaatgtgaattgaaaaagagaagacggccatctacaagccaaggagagagttccggaacagatccttccctcacagttctcagaaggaaccaaacctgtcgataacttgatcttggacttccagcctccagaattgtgaagacaataaatttctgttatttaagccacccaatgtgtggcactttgttactgcagctctagcaaactaatgtagcatctttacaatcagctttcactgcatctatttattcatcaaatacttattgaaagcttgctaattcccaagactgttctgggtgctagaaacacaatggtgaacaactacaggcatcttccctgccattatggatcttacagtctaacaaggaacacagatgtaaaatcaaataatcacttacgaatgtaaaattactaatagtaaaagaaaataactaaaaagagacaatgaggatgctaaatcattcacataagcaggtgcctgacctcatctggggtgtcaagaaaacttccttgtgtcaatgacacatgagctgagacttgaaagattagcaggaattggtaaagtgaaaggaggatgtgaaaagtgttcccagcagagggagcagcacattcagggataagaggggaagctgaagtgggtgaaaggaaggcagggggattgaagtcatcaaggccacagatcacctctcaagcaagtccttgcaatccaattttagaatgtagaaatttatcttaagacacccttttatgacctcagatgagtgagcaattccatgtctaagtacatacccaagagaattgaagacataggttggcataaaaacatgtttacaaatgttcatagcaacattattcataaaagacaaaaagtagaaaaaacccaaatgtccatcaactgaggaatggatacacaaaatgtggtgtctccatacaatggatattatccagccattaaaatggatggattaatgatatatgctacaacacggatgaactgtgaaaacatgatgttaaataaaagaagccagtgacaaaagaccaacgtattgtgtggttccactaatattaaatgtccagaatagacaaatctataaaaacagaaagtaaactagtggttaccaagaactgggggaaggggaaatagagagtgattgctaacaagtacagtttcttctggtgatgataaactgttttccattcagataatggtgatgtttacgtaactttgtgcatacactaaaaagcactggatcgcatactttaaaacagtcaatgtggctgggtgcggtggctcacgcctgtaatcccagcactttgggaagctgaggcaggtgggttacaaggtcaggagttcaagaccagcctggccaacatagtgaaacccccatctctactaaaaataacaaaaattagccaggcatggtggtgcgcacctgtagtcccagctactcgggaggctgaggcagaagaatcgcttggacccggaaggcagaggttgcagtgagccgagattgcaccactgcactccagcctgggtgacagagcgagactccatctcaaaataaataaataaataaataaataaataaataaataaataaatgagtgaatgttatgctgtgtggaatatacctcaattttaaaatgtatgagaagaaaggacaaagagaagcacttctttttttggcagtatggcagactgcatccattaccactcccactgaaaactaaatgatgccactaaaatattcaaaatatcttttaagtatattgataagcttgcaagaaaccaaggaatagttagaggccaaaataaaaacgagaagaagtaaactgaatattaaagttggctcttaccttgaagtcatttgcctggtcaagttactgattttctgtttccatggcctcatagaatatggaggacaggtgacaaaacccacagcccaaacaacatggatgatcttatagcaaacacctctatctaaagctaggatttcccaaaggtatccaatttgagcataagggtagacaattaaggttaagccataagaaattgccaatatttgattatttttgacttatgaaaaacaattttccatggttcaacctacacttagccctcagtgatccccctatccaaactcccagaaattgcaaggaaaattgcactttaaaacttggaaatgagtaaagaggaaaataattcccttgaggaataaatgttcactcagaattacatgttaaagaaagacatttttgaaaaacaggaacaagtaaagacattttcaaatgcctaacagatggaccaacagattctcactaaagaaatttgtaatgaatgttcatcctacagaagaaaagtgattccagatgaaagagccaagatgaaaagaaatgtcactattatattaaccaaaataaagctagtagagctacattattgtccatcaagatagacttttagacagaaagaaaaacaaaagataagatggtcggcacatattttaaagagatgcattctccaggaagaaatactgactaaattctttctaataaaatatttttcaaatgtattagcaaaggttgacagaaaacaagagaaatgaaaaaatatatcataatgacagttttcaatacacctatctctgtaattgacagatcaagacaaaaatcagtaaagacatagaaaatctgaataaatcataagaagcttgatctattgaggactaactgacatacacagaatactacaaccaaaacacccaatcttttcaaacacagagagaatcgttatgtactggactggaaataaagtctcaaaaacttcccaggaattagtgtcagacacactagctcagatcacaatgtggttaagttagaaataaataccaaacacacaaaaccgcttatgtatggaaataaacatacatctaaatacttcatgggttatagaagaaatcttaataggacttacaatatattcggcaatgaataataatggactacctcattttataatttatgaaatgcagctaaaatagtacttaaaaggaaatatataaccttaaatataccaatgagaggacgggagagattgaaatcaatagctaagtctctctgctgatcactttcagggcacccctgtagatctattagttgcccttctgtccattgttctgtgcttccaaaaggcttacctgtaaagactgcatcatcccagctactttcctgctgacttccacttgggtttactcaatgggtgacactcacaggacataagagattagaaagagggataaggatttttatatatctgctccctccttacttaaagccatggttttagcagaggcccaaggtcgtggcttttttgagcagcccctttatcaaaggtctggaaagagtctaccttccccctcacaactgagtaatgaggcttactactgttgctagttctgggtaactcatctcttattggtttctttaaccctgacacatttatgtaaatactctcctccttacactctcttaagtcttcctttgactatgccatctatttcttgccaggaccttggcagacagagcatcccacttaagaagttaagaaaagagaaacagaataaacccagcaaaagtagatggaagaaaaaataaagataagtagaaattaatgcaatataaagcacatatacagtagagaggaccaacaaagacaaaagttgacaaactatttgcatgattgagcaaggaaaaaaaataatattaaaaatgtaaaggacatagctaaatataatgtcgagatttaaaagataccgagagaatagtataattttatgccaataaatttgaaaacaaagaaatgaataaatttgtagaaaaatataatgcaatttcaattaaaaatccagaagatacaaccctatcaatgggtgtcatgcatccatctcagacaggaatccaggagtcaattattaagtcaattattaaagaattttgtgagctgattgttaaactgttggtagcttgatgttggccagggtgggagtattcacactacaaaaataagtgaacactacaacaattatagaatttgagtcattagttaaaaatctgcccacaaaaacttcgggcttcaagggtttaaccagcaagctctacgaaacattcattaaacaagtaattctagtcttctataaactctttcaggtaaacagagaatcatttgatgagtttagcataactttgatgtccaatatgatgaagtatgaatgagaaaagtcacaggacactcttattactaactaagcaaaaaatgctaaacacaaagtaaagcaaatccagtgatgtgtataaaatataacatgaataaaatggattttcccagaaatactttcattagaaggcataacactagaaaatctttttttattttttatttttttatttatttttatttttatttattttttttttttgagacagagtcttgctctgtcacccaggctggagtgcagtggcatgatctcggctctgcctccgggttcatgccattctcctgcctcagcctcccgagtagctgggaccacaggcgcccaccaccacgcccagctaattttttgtatttttagtagagacggggtttcaccatgttagccaggatggtcttgatctcctgacctcgtgatctgcccacctcagcctcccaaagtgctgggattacaggcgtgagccaccgcgcccagtctagaaaatcttttaattctccacttaatacatttatgaacttatgtcatcatctcaatagattaaaaagaacctcaataatactcatcattttaaaaaagaagaaaaactcctaacatatcgagaataggggagaatttctttaacctaataaagagtaacccccacaaattcccacccccagcaaaagaaaaagaaaaaaatgtggtaacacattgaatgcattttttgtaaagtcagaaacaactcatgggcacccaatgactttcgctacttctatgtaacattgtcctaagggttttagctggcattttaaggcatggaaaagaaataacctgtacaaaataacaaggcttattgcaaaatatagcgtgggagaaggtagctgtcaccattctcaaggaggaagtttaaacccaataactataccacaacaaaacttgaaggcaaagagaaaagatttatagagaaagacccaagaagctagaaaaagtttccctccttcttcttccataatgatttttctgacaggtgaagccaccgccaccaccaccaccaccaccaccaccagggaatcattaagagcccttagatctcaccaggtactatagaatctggaaacacagtgagcaagaaatctcattccatcaggcccattctagccaccagtagccatcccaaggtaaagcaattgctcctgcccccctggaatgatgaatcccctattctctgccctccttgaatggctggtggtttcagctatgagtgtggtgtactgatgctcaaagtgtagtccaaggactgttgtaggtctactctttgttactggtcgctaacaagaaaagtgcagaaatgaagagtaagcaaacagaacctgtatagcaacttgacacagtcatttcacatctgttgaatctaacgataatttttttaaattctggcttatatttgcaagtcttttttctcaattttatttttctattaatttatttttagtgtattttttaaaatcatgaagggattgaaaaatttaaaacaaacaaaacaaccaaacaaaaaaaaaaactgatccctcacctggggcacttttaaaattcttagtgccccgcctaaaccctacacctacacctattgcatcagaatatctagggtggcaccagacatcaatatttctttataatccaggctattgtagtttgcaaacagggtgaagccttcctctccaaagcatgcctgtggagcaacagcattggcatcacccggagctcattagaactacagagactcagaccccacccagacctatggaaccataattgcatttcaacaagaagattgtatgcccactcaagtctgaaaaggttaaatttagagaatgatatcagaggtattggtctgcttttcaaggccccaagagcacagagatttttctggagagggagtgcgaagtgggtcatcaccagcactaatattaccacagggacttcctaattgactatccttcccacagctggcaaggtgacctttcctaaacaaacctgttactgctctcctggggcctacaagatcaagtccaaacccctgacagcacaggatactcaccacccctcaccccatccccaacattttgtccccttcttatctgctcaacctccttcacacacactcacacaccacactttacatacacatcatacccactcacacacaccacacacacgccatgcaaacactccatccataccacatatactctacatacacatcatatacacacataccatacacactgtcacacacaccgcatacaccacacacacccacacataccacacacacatatacatcacagacaccatacccactcacacacagaaacatataccccacacataccacacacatgctcatacatacacaccacacacacactgcacatacacaccccacacactccacatacatatcacacaccctcacactcacacacacacacacacacactctggacacaactccattcctctgctaattcccctatctctgcctaaaattctaccccctctcaatcctcaattaatgtcaccctcttgcctacctaaagaactccttcccctggtggctcacaactgtaattctagcatttgaggaggcagacacatgagaatcactggatcccaagtctgagaccagcctggacaacatagaaactcctcatctctgaaaaaaaagaaaaattaggtgttgtccacctgtagtctcagatacttgggaggcagagacaggaggatggcgtgagcccaggagtttgaggctgcagtgagccatgattgtgccactgcactctaatctgggcaacagagcgagaccctgtctcaaataaataaataaataaaatgactttccatacttcaagacacaagtcaaatatctccttctccatgaaacctcctagaaaaggcaggcatttcctcctccaatttcccacagcttctcctacaaccattcaaatatagctatgattatagagtgggaattgtttacatgtctgtcttgctcatggctttgtgctctccctactactttctctctatggcacctcacatccactttgtagcaaaaggaatcagaattttgtaagaatcaccagtcaaggatctaactagatcccaatctctcctcacaactacatcactggttcgtggaatttccccttgaagatgcacaatcaattaaccatactcgggaaatatttaataaatgctgccttgggaatccaaagatgaagacattcacgcagagaatatccttctgcaacatttgactattccattctccattcccgcccagtaagtactttaaaacagtcacaatccaatgaaaaggtgagatgacggcactcttcacattttttcacaaagctttcaagagtaaagattaaaatacgtataaaccacacccataagatgatattttaaatacagttaattctcattattcatggtagttatgtactataaattcacctggaactctcatttagcaaatactcaaccactgctcctaaggaaatactaggtaggttcctgcaagcctttggtcacaacatcttaatcactggggggagtggaggggctactttttattaggttaaagcgattcccatctattcttgatgcgttagtttttcttctttttaaaaatgatgaatattattggagttctttttatctattgagatcatggcataagtttcttaaggtggagaattacactaaaagattttctaatattaagccatccttgcatttctgggaaaaatccattttgtttatgtgacattttgtacacatcattgaatttcctgattttttgcgtagcatttttgcttccatgttaacaagcaagattctgctatgatttttgtattcatactttatcagattggacatcaaaattatgctaaattcattaaatgagtctctgtttacataaaatggtgtctaagactggaattacttgttttacaaatgtttgatagagcttactggctaaacccttggagcctgtgaccacacttgttggacaactcaagtttttacccactctgaacatgtccacaaatgactgtgaaagcatcacaactgttgatttgggagttacaaataaatttgtatcaagtaagtatattcacaaatatggaatctgcaaatagtaaagattgactctatctaacaagtggtagggtaagagcattaacaaaccagaagagttgcaaatcacattatttaagatcctagggactcctgatgtgccaggcaagaataccttgattgcagactgctgagtcatgtggagctctagggagagtccaaaggaagagctgggcagctggggtggcatagggacagcagctatttaccaatccattagggaagaattgcaatatcttgtattcatcactttaactaaactggcccttcctgataccaaagtaataccaggctgagaaattccaaatttctcctattactcattattttgtaaatctgtttgacccacttacattggaaactgtattatccctcctccagacagaaaacctaattatatcttaagaaaggggaaatctgacactgaaatgattttaatagcaatctgttggtactagcaaactgattatatttcatatggtacctctcccagtcttcatggacaggagcagagtcttctctgtagaaactgcaatgttgtccaaatttgcaaaatgccaattctagataatgacactcaagtgctgagggaagtggaaggaacagcctgttaccttctacttcagtgctttgatggctgaaatgggaggagtcatagactggctctggctcaatgcccttcaagggataatctagtctagagcagtgctttgcaaaatacaatgtgcttacaaatcgcatgagaatcttggtaaagtgcaaatactgatttagtaggtttggactggggcctgagactttacatttctaacaagctccgagcgactgctgctggtccagggaccacactatgcatatcaagggtcaagactggagtagtggttctcagtcacacttgggcatgcatcagaattacagagagaaagcctgttaaagcatagattgctgccccagagtttcagattcagtagctctgacttgggcctaataatttgcctttttaacaaattcccaattgacaataatgctggaagtttggggatggcatgttgagaattactgatctagactagaaaggcaaacccttagaaccatgtttcctccagcatttccatagacataaaaatgctagcctttcatcatgttgacaaagaacttatatttccataaaagatataactctaatgatgaagttcccaaggacaggggccacatcttgtattcatttgatacaatataaatatagtaagagcaattaatacagtctagatttatggcaattaaataatgaattttactatctgatgtaacattttacccttttagtgctgtctcaactggtgcaaagctgatcactagctgccaactcttgctcttaattcatttttacaaatttcaaagtctccctcttctctctccttttttccaaatgaaaagccctagaaagaaagcaactgggagtcagggggttatggctcctttactttttatctcttatgcctaaaaaagacctgtcaagtcaggcacagtggctcacgcctgtaatcccagcactttgggaggccaaagcagacagatcacctgaggtcaggagttcaagaccagcctgaccaacgtggagaaaccccgtttctattaaaaatacaaaattagccgggcacggtggcacatgcctttaatcccagctactcgggaggctgaggcagcagaattgcttgaacccaggaggcagaggttgcagtgagctgaaatcacaccattgcactccagcctgggcaacaagagtgaaactctgtctcaaaaaaaaaaaaaaaaaaacttgtcaaagtgtaagtgctcaataaatatctgaggaaaaggaaggaaggaaagagtgaaagaaggaagggagggaggaaaaaagggagagagagaagagagagaaagaaagaagggaaaaaaagagggaggaaacataatacccttagttaaatttgtagtttgccattggcatgtcttcaaaatgattaagctgaatagctttctaaaggcagaattttgattcattttagttgggcctctattccagatgaagtccttccagcaataaaaattgaaatgatttcttaataataatgataataagttttctaatccaaagtgttatgatactgttagcttatacaatgcagttggcaactaggtcaccatgtataagcattatctataacattgtcttctaactgatatatcagcagattgatttctcctgtaaaaaaagatagcaactaccaaccagagacaatcacagtctatttaaccagctaaataattaaaggccagatgtttgcccacagcaagtcaactgtcccttaactaacatcttccaagaaccagtgaggcttggctgcctgtcctggtgatgagaccaaggtctacttacgagcatttacaggtgcctactacatgctggtgatttctgggagtcaggaggaagattaaaggagaatcaggtgcagcctatagctgtagtagttggcagtttatctagagagatgatcaggtaaataagtaactgtattataagagaggtaagtacaaaggctatgggatggcagagatagtgtcaaaataactccttgggagagtcaggaaagacttgggaaagggtgacatttatgctggctgtaaaagaagatataaaagtgaacttagagctgagagtcaagacacagtgttctctaagcagagaacggatatgcagacatattgcaaatacattcttagagaaaaacaaacatcattaaaccagtgaggacagggagttatcctgtatctcagcattgagcatctgtcacctgtgttcacccaggccgatacttgtaggtacagtttaattcagggcttgaggacaacagcaaacaattcattaagagtgactatggggccaggcacagtggctcacgcctataatcccagcactttgggaggtcaaagtgggcaaatcgctttctatctaaaaaaaaaaaaaaaaaaaagaacaaaacaacaacaacaaaaagaatgactatggcatgagaaccatgtagagtttactgcacagctccagtagcaggcacacagttccatatctactgagattggtttggcattaatttccattttctcatcaccaaggaactggtaaaagtcttagccactggaactgttacaccagatttcaaatcttctttcactgtttatgatctgctgatccactcttctgagtcttatgctgttttcatcccagtacaacctgccctgttttcttggaccagaacctgtacttttaatacctgtttcaatgtatattccagggacactttcataacggagactttgccaatagttttgccatgaagaattctcctgcttactatgtgaattgttggccagcaaatggcttctcttgcgggggtccatcctacagacactgacccaatgacagatgaataacgtacactgacacatatattctgcttgtcagtctggctaagggtccgggcccctcacagataccaaggaaggtgctgtaaagagtagcagccgtggccccgttcagccaacaaagctcacatttattcagtatggattaaatgacaaaggtcttgagtaaacactgttagagggtaattgacctggttgccgatccaccagtagacagaaattatgcacccgtggttgattaaaggttggtcttaggaccacatgagtaaacaagctatttagataaactactctatattcctatgtatctacaccctacgcttttaagggagttcagctgtcttcagccaaacactttacacaaacccccaggccttctaagagggtttgtgtttaattcctataatttcatcttaaaatttttcccaccagcctgactgaactcccacattctctctttggtgacaaaccctgcagctttctctccctctttcttatttaaacatttactttccagagcagctgcctgtttgttcttagtgattagcagtctcctgtggtggaacaaggagaaaagcatggtatatcttgaggctttttggtgaaagaaataccttcttgaatggatttgagctgcaaatgggtcccccttgtggtgaagtttcccactgggagaaaaagaaacacatggccagccaggcgcagtggctcatacctgtaataccagcactttgggagactgaagcaggtggatcacaaggtcaggagttcgagaccagcctggccaacatgttgaaacccccatctctactaaaaatacaaaaattagccaggtgcagtggcaggcacctgtaatcccagatatttggcaggctgaggcaggagaatcgcttgaacccaggaggtggaggttgcagtgagccaagatcgtgccactgcaccctagcctgagcgacagaacgagactccatctcaaacaaacaaacaaacaaacaaaaaacacacggattcactcattcaacaatatttatgaagcatctgcttatatgcctggcattatcccaggtgttaggatatggtggtaagcaaaacagattaaaaattccttgcctatctgaactatgtgatgcctctttgtaatttcataggagctcaagcttgcacctttaaacaattctgagatgaccatcatgtaggctatacaaagacatgaagaaatataagagcagaatcattcaacgagctgtggaaaaccatgcctgttatttctgtgcttctcccatctaacacaagtgcctggtgtaatttttattttattcaataaacatttattgagtgcctacaatttatcaggcagttatatttcagaacaatatttttcaaactttaacggacatgtgaatcacttggagatcttgttaaaaagcaaattttgattcatttgatgcaaaagtggggttgggggtggggtgcaggggcttagattttgcatttctaacaaccttccaagtgacgccaatgttgctggttcatgcaccatactttgacacaatcacttacattctggtggaagacaggtaagtcaacaattagagaatagtaagttgaggccgggtgtggtggctcacgcccgtaatcccaacacttcgggaggccgaggtgggctgatcacttgaggtcagaatgtttgagactctgtctctacaaaaatacaaaataagctgggcgcagtggagtgcgcctgtagtcccagctactcgggaggctgaggcagaattgcttgaaccaggaggcagaggcagaggttgcagtgagctgagatagcaccactgcactccagcctgggcaacagagtgagactgtgtctcagaaaaaaaaaaaaaaaaaaaacagagagagaggcccggcacggtggttcactcctgtaatcccagaactttgggaggccaaggcgggtggtggggcatgaagtcaggagatcgagccatgctggctaatacagtgaaaccctgtctctactaaaaatacaaaaaattagccaggcgtgatggtgcatgcctgtaatcccagctactcaggaggctgaggcaggagaatcacttgaaccagggaggcaaaggttgcagtgagctgagattgcaccactgccctccagcctgggggacagagtgagactccatcacaaaaaaagagaaaaaaaaaagaaagagagcgagaatggtaaactgatatatagaaaacacagtgtagcgggagaacagaggaggacacagagtaagaactaaagatggggacaataggatgaaaccggtctcctgaaatacaactctgagtccagtatgaagggtaaagagggagagactgaagacataagctaatactcacaccaataaggataacatttattatttacatcatgctaagcattgtgcaaagtgctttatagcctaaaactcattgaatcctctcaatagccctatgagataggtagctatggtagacagaataatgtccccaaagatgctcatgtcctaatccctggaaactgtcaatatgcaaaaggagaattaaggttgtgtaggaaatgaagtttacttgtcatttgattttaaactagggagagtatcccggattacccagatgggcccagtgaaaccataaggctccttacagtgaaagagggaagccgaagaagagtctgtgttcgagtgatgccatgtgagaaagtttcaaccagccactgctagctttaaggacagaaaggggccatgaaccaaggaatacaggcagcctctagaaatggaaaagcaagcaaatggcagtttcacctagaacctctagaaggaatgcagccctaccaacaccttaattttagcccagtgagacctattttcggctcctgacctctagaaccatgagataataaatttgtgggttttttaatttttgatttttataggtacatagtgggtatgtatatttatgggatacatgagaccaatacaggcatacaatgtgtaatcatcacatcagggtaaatggggtatccatcacctcaagcatttatcatttctttgtgttacaaacataccaattacactcttttagttttgttttttgtttgtttgtttgtttgtttttgagatggagtcttgctctgttgcccaggctggagtgcagtggtacgatctcggttcactgcaagctctgcctcttgcctcagcctcctgagtagctgtaattacaggtgtgcaccaccatgcccggctaatttttgtatttttagtagagatggggtctcacgacattggccaagctggtctcgaactcctgacctcaggtgatccgcccgccttggactcccaaagtgctgggattacaggtgtaagccaccatgcccagctcttttagttatttttaaatgtacaataaattattgttgcctgtagtcacccttttgtgctctcaaatactagatgttattcattgaatttgtattgttttaagccaccagagttggggtaatttcttataacagtcattggaaactaatacagtattatttaaagataaggaaatggatgcacaaaagttcattaacttactagtaagtagctagtttggggtctgaactctggattcatgttaactacaccttagtagattctggatctaagaaataggacttgacaggatttggtaactatctaatatgcaaggattcaggagatgaagaaatctagaacaccaccaaggtttctagttcaaaccactgttggggaaatgacaccactcattgatgaaaatataagaaatgaacgagcaattagtaattacgggagatgcttaaaacatatttgtatttgaattgcacactcaaatccagattctgccggtagtcaagctaaactgtggtaattctcttaagacataatatcctcaatctgatcttctctctggctcctcattcaagttcaatagatgcagagttgggatgaggagatgcaaaaaacacatgtgagagatattgtcaaacagggtcagcctttatctttcaaaagaggacatctctgtagtgtgagaattattattcaattggcacttcccttcaaagttatgaacttacctcaagatcaacttagaaaatagctgcctatcaaacattcctaattccctctgcttcaacccacaatacaatacaaagatttgaggaacctcctttgagagacactttttaactttaagttcagagggaaatgtccgaccagctaatttagctaaaactccctgccggagaaaggctctgttgtgtaagcaggctttgaagtttcaatgacttgggtttcaatgttggttctgctgcttactatctgtgtgatcttggacaagttacttaacctctctgagccttctttcctcattattgtgaggattaaatgagacacatatgtaaaatgcctggtacatgaaaggcacttaatcaacattttctttaaattttaaatcagaaaaatatatggtaaaacagaaaggaaaaaaatcttaatgtatcattacctattatgggaagtcactttaacacagtacatttttatcacctctaaaatgtccctcagtcttcgcagctacttaacaagtaaaatggagatctctgacatctaccatataactcagctgatttattacccaggttcaaattccgagcttccacgctctgcagggcctgctggaatgacaacttcacttaatacacgaagacctgggatcaaatttcccccgctcttctagggtcactcaacccagtcagctcatcacgtgtaacccatgtaaaagcaggcccccatgaagtccagtctcaaaccacagttgtaccaaagaaacaaagaacaccaggaacacaaaatagcagaatcaaatattttcctcttttctagattatctcccctccacaaatactcacagctatactcttctctcagaaagccacactttactcccttactttattcaggtctctgcttaagtgtcacctgttcaaagacacctccctgatatctctaagcatcttttgtttctgtccctttatcctgtttaatgtttcttcatagaacttgttactatctaaaactatatcatagatttatgtttgagtattgtctacttcttccactctcatataagctctaggaagacaagatctttttctgttttgttatgattcttatcatcatgattcactgctgtatacccagcacttaaaactgatctaggcacataacacatgcccagtaaatttttgttagctgaatatcaaaagatcagtgttcttatattatggatatgtaactcaagtaaaggaacaaagaacaaagatgctccagaaaggacagtgttcttttaacttgactagtggagccaacatagattgaccttataagggtctatttgggaacatgagaaacaccctctccaaataacctgctttgttcttttccaaaaggcatacaacacagattattgctcagaacagtgagttcataccaagagcagagggagtagagagcaaacaatagtttatatgaaggtaagaagtaagtggctggaacgaaggttggtacaaaagcttatggtcacgtgaggaaagtaatctcaagttctggggtagcttcacttaagagggacatagtttttcagagaacaagggaagaaggcctatgaagctcagggcaagatgtacacacagaactaatttctctcttttctgcacactctgggcacacacaagttaggtaattattagtttatctgatttaagttgcctcactcagaaatatttcccaagagtgaatgtgctttgtttttctctatatcaccagcttctacttcagtgcctagtattgttgaggctcagaaaacaaatgaaggcctcagaatcaaaagttttttctctgatcttctcctgacctcctgtctcccagacccattctgcccgaaagtgggccatagaaattattttttcttattttattattattatactttaagttttagggtacaggtgcacaacgtgcaggtttgtcacatatgtatacatgtgccatgttggtgtgctgcacccattaagtcatcatttagcattagatatatcccctaatgctatccctcccccctccccccaccccacaacaggccccagtgtgtgatgttccccttcctgtgtccatgtgttctcattgttcagttcccacctatgagtgagaacatgtggtgtttgattttttgtccttgcgatagtttgctgagaatgatggtttccagcttcatccatgtccctacaaacgacatgaactcatcattttttatggctgcatagtattccatggtgtatatgtgccacattttcttaatccagtctatcattgatggacatttgggttggttccaagtctttgctattgtgagtagtgccacaataaatatacgtgtgcatgtgtctttatagcagcatgatttataatcctttgggtatatactcagtaatggaatggctgggtcaaatggtatttctagttctagatccctgaggaatcaccacactgacttccacaatggttgaactagcttacagtcccaccaacagtgtaaaagtgttcctatttctccacatcctctccagcacctgttgtttcctgactttttaatgattgacattctaactggtgtgagatggtatctcactgtggtttttatttgcatttctctgatggccagtgatgatgagcattttctcatgtgttttttgactgcataaatgtcttcttttgagaagtgtctgttcatatcctttgcccactttttgatggggttgtttgttttcttcttgtaaatttgtttgagttcattgtagattctggttattagccctttgttagataagtaggttgcaagaattttctcccattctgtaggttgcctgttcactctgatggtagtttcttttgctgtgcagaagctctttagtttaactagatcccatttgtcaattttggcttttgttgacattgcttttgatgttttagacatgaagtccttgcccatgcctatgtcctgaatggtaatgcctaggttttcttctagggtttttatggttttaggtctaatgtttaagtctttaatccatcttgaattaatgtttgtataaggtgtaaggaagggatccagtttcagctttctacatatggctagccagttttcccagcaccatttattaaatagggaatcctttccccattgcttgtttttctcaggtttgtcaaagatcagatagttgtagatatgcggtgttatttctgagggctctgttctgttccattggtctatatctctgttttggtaccagtaccatgctgttttagttactgtagccttgtagtatagtttgaagtcaggtagtgtgatgcatccagctttgttcttttggcttaggattggatttacttggcaatgcaggctcttttttggttccatatgaactttaaagtgggccatagaaattattatccctcttccccaaggcggttcatagaaaccagaaccccttttccgcaatgccagccataaaacctaaaaatattactctaattttctctctgtttttctgtgtaaaaattggccacatagccagtcatggtggcatgcacctgtagtcccagctactcgggaggctgaggcaggggaatcatttgaacccggaaggtggaggttgcagtgagccaagatcacaccactgcactccagcctggtgacagagcaaggctccacctaaaaaaaaaaaaaaaaaccccgtccatagagaaattatctgacttgccttgtttgactacaggtcatgtaactgcccaatgtgttcaccttgcctgctgcctagacagagcccatttatcaagattggaattacagtggagaaagagtaattcacacagagccagctgtgcaggagactggagttttatgattattcaaataggtctccctgagcattcagtggatcagagtttttaaagataatttggtcggcagggggttgcaaagtggggagtgctgattggtcaggttggagatggaatcctagagggttgaagtgagtttttcttgctgttttctgttactgggtgggatggcagaactggttgagccaggtctgagtggtgtcagctgatccagccagtgcagggtctgcaaaatatctccagcattgatcttaggtttcacaatagtgatgttacccccaggagcaatttggggaggttcagactcttggagccaggttgcatgaccgctaagtcaaaccatgaactgaattccttcccaaagtcagttcggcctatccccaggagtgaacaaggacagcttaaaggttagaagcaagatggagtcggttaggtctgatttctttctgttgtagaaagtaaaaagtttcctcttcaaagttccccatcttgttaaagaataaatcataagtgttagaaatggcagtttcttgtaaagactaactttcttcaagcctccttgctttgtgctaataactctttgttaagccctatcctatgtaactgttggacatgctcacaagcatgttccagctcacagtctatgccccttccttatttggaaatgttattgcttccttaaaccttttgtaagcaacttctttgttcttccttgcacttacctatttaggaaagttttaggctattagcaaatcgggtatcagtttaagattgtgaggttcggccgggcgcggtggctcacgcctgtaatcccagcactttgggaggccgaggcgggtggatcatgaggtcaggagatcgagaccatcctggctaacaaggtgaaaccccgtctctactaaaaatacaaaaaattagccaggcgcggtggcgggcgcctgtagtcccagctactcgggaggctgaggcaggagaatggcgtgaacccgggaagcggagcttgcagtgagccgagattgcgccactgcagtccgcagtccggcctgggcgacagagcgagactccgtctcaaaaaaaaaaaaaaaaaaaaaaaaaaaaaaaaaaaaaaaagattgtgaggttcagctccagccaatggatgccggacacagcagtaaggacgatccaaatgtacaagggataaatatgtccgcttttcctttgttcaggtgtgctctcaccattgttccatctgcgattgagcaccctttctgcagaaagtaaagattgccttgctgggagatcttttgtctctgtgctgacttttctttgccacaccaattatttctaacaattttggtatttctaacaactgtcataattccctcagttataattttgcataggtggttttagtcataagacccccattgcagagaggggccagccccatagccagaagaaaggactgaatgctcagagaggccaagaagaatctaggcagactttgcttggtttcccactcagtccattagcaggagatcttaccctttttgtccaatcatagctctacacagctgtccatactttgttgaacctaagcataaaaatgggcaatttcccctttatctttgggtcttcattctgtaggctcttttgtataacgttaaataaatttgtatgacctttctctgattatctgccttattgtgagttgatttttcaatgaactatcagagggccaagctcttgatcccgacagtatatttcagatttcattaaatacttgttaaataaatacatgatagacaacaatgttatttgtcgataattaaaataccaagatataaaattgccatttctttaaacttttggctcacacataccttttagcagagatatagcaggatggtttaaaaaaaagaaagaaagaaaagaaagaaataccagctttatattcaggaaattctggcttttaatactctatattaaaaccaagattctgttatgtaagccacccggtttgtgttactttgttagcgaagccccaggaaactaatataaagggcaaaataggggaagagggagggagagaagaaagacagcaacatcagcctagtaaattgagtctctctggaagaaaaaagaaaaaagacaaacattcacctaaagctaatttgttatgggtttttttgttttttgtttttggtgtggtgtttttttttggatggagtttcactcttgttgcccaggctggagtgcaacagcgcaatctcggctcactgcaacctccgcctcccaggttcaagcaattctcctgtctcagcctccttagtagctgggattacaggtgcccaccactacgcccagctaatttttggtatttgtagtagagacggggtttcatcatgttggccaggctggtctcaaacccctgacctcaggtgatccacctgtctcggcctcccaaaatgctgggattactggcatgagccactgtgccaggccaatttcttatgttaacatagcctcaagtttcccaaaaaatagttaatacgtgttcctgatgtttaagtgtttctttcctgaggaggtaatagatgagaaacctttccctacagtagtgtttaagggggtcagcatgggtcttcagcaacatcacttgtagtacttgcttgaaattcccatttctgcttccactgaaccttccaaatcttgagattccaggagcatgaatttcttaccagctccccaggggattctttaagaaaacctctagctagcagccttctgctccctctgttgtccaagttatacgtttgtaagttttattggttggttttatgaggaatatgttcctccacattctacattttcctttgtgctaagaaaggatctaaaaacatctgaaactctaacattgtaattgaagctgtggatcaaactgtagaaattataaattcatctggttgtttattacatcttagttcattttgtgttgcttagaatacctgaaactgtgtattttataaagaaaaggaatttattttctacagatcaggaggctaagtccaaggtcgaggggttgcatctagtgacagccttcttgctggggacttctttacagagtcccgaggcagcacgggatatcacatggcaaaggtgctgagcatgagctcaggtctctctttctcttcttataaagccaccagttcccctcccatgataacataataatccattaacccattagtccatggatggattattccattcttgagggagagtcctcatgcaatcatgtctttttttgttttctctgagacagagttttgctcttgttgcctaggctggagtgcaatggtgcgatctcggctcggtgcaatctcggctcactgcaacctctgcttcccaggttcaaacgattctcctgcctcagcctcccgagtagctgagattacaggcatgaaccatcttacccagctaattttgtatttttagtagagatggggtttcaccctgttggtcaggctggtcttgaactcctgacctcaggtgatcctcccacctcagccccccaaggtgctgggattacaggtgtgagccaccacacccagaattcaatcatgtcttaaagaccccacctctcaatactgtcacactggggattaagtttcaatgtgagttttaaagggtacatttaaaccataccactatgggatgtaggttgttttgatgagggacagtctcaaaatgggaggaagattagaatatatatatatatatataataatacaaagaaaaggcttatctatgtgttaaccggggaaagtttgccactttggtaggagaaaaaaaattataaaaatggtcactatatcaagataaatgcccctgtctacaatgaagatttaattattgtaaatttttatgcagcatctaaatccataagtcaacaacttctaaaaatgtaatgagaaataggtaaaaatttaattacagtaagactgtagcttatctttgaaaattaataaaaataaaaaaagtgtcctacagccaaaaaactttaaaactctctctgaatttgtttcagaaaaaattcaaatcaagtaaagtaaatagatccttttgtagttcataacagtgattactgggttttcacgttcatgtgtgagatgtgcctttctttttttttgtttttgtttgtttgttttttgagacagagtctcgctccgtctcccaggctggagtgcagtggcgtgatctcggctctctgcaacctccgcctcccgagttcaagcatttctctgcctcagcctcccaagtagctgggattacaggcacccgccaccatgcctggctaattttttgtatttttagtagagacggggtttcaccatcttggtcaggctggtcttgaacccttgacctcgtgatccacccgccccggcctctcaaagtgctgggattacaggcgtgagccaccgtgcccggcagccttttttaaacctttttaccacatccgcacattacccatctgacatggaaaaagaaaagaattgtaaataatttagaaaataacaataaaatcacaatgcatgagaaactatgggaaacctcaaaaaccatgagaaaaaattcataactttaaacatttttaatattaaccaataaagagttgaggactaaactgatttttttatcttgcccaaattcccatctaaagagtctgaggagtcatgccctataaaccataagttctcatcagatgggttttatttaaccctatatatcgtggctttccaacctgactctagcataacattatgagacaaggaagaaaattgaaatatttcaccccaaaacatgtttatttgccatatcttgaaatggccctgcaaagctgtcctttgtgggggaaaatttgtgtctgtaaagaatctctgttaacgtaactagatctttttcttccaggccctcccaatcctagagattaactaaaagtttagcaccttttaaagatctgaatatgaaatatttgccatctattatctctaagggcagccacaataagacttcaaaggaaccttggcctccataatcttttatcttaacccaaatatttcctttctgtcagtctcagatctttagacaaactcagccaattgtcaaccagaaaatgtttaaatttacctatagcctggaatcccacacccctgactttgagttgtatcatttttctggatcaaaccaatgtatttctaacatgtatttgattgatgtctcatgcccgcctaaaatgtataaaaccaagctgcaccccaaccttctgagggctgagggctgtgtcacaggtcatgatcactcatatttggctcagaataaatctcttcaaatattttatagagtttgactctttttgttgacaaagcttttaaattaagcttttaaatcaaaacattttagaagaagaaagctaaagtaaaccaaaagaaacatgaaagatgaaagtaaaaaaccatgaattacagaaaaaaaacagagagacaggactaataaatacatctaagaactgaatcttagaaaaacaatgaaataggtagcttaactggctaatataatttttaaaaggcaatacaaaatgaacacatttagaagtgagaaaaatatacatgcacataaagggaattttaaaagattataaaaactggatgaaatagattattttaatataaattacaagtttatactaaatgtaagttaatttaccaaaaatgacagcaaaagagatggacaaaaccaaggacacaaaatactacaaagaaactgagaaagtgatcaaatggttacccttttaaaaacactaaattcagacaatttcacagagggcttcaatcaacttcggtcaaatctacaaggaacaaagcttgccagtgttattaaaatagttccaaagcataagggaaaaaggctattcaatcagtatttacaaaaccagtataactttgacaccaaaatctgaaaataataacacagaaaactatagaccaatattttatgaacactatttaaaaatccaaaataaaataatggaaaaagaaaacatctattaaaaaaaatgcaaaatgatcaaggattcaatgaagaaatttaaaaattcaacatattaaaagatcaaaggaatgtcaacctaaaggaaaaaattgaggccaacttaacgtaagtagagattttatttggaccaagtttgaagactgcaacttgtgaacatagatttaagttgccctgaatatatgctctgattagctacagttacaagtaggtttctaaagaaaaagaagaagcagttcctaagttgcttaccaagtattttatattaaaatcacataagctactgataggctatacattgttcttcatatcaaaaattccaggaacatgaaagtaatgggtgaggcaggtagtcaggaacaaaatgccttccttttttttttttttcccccactttttaaaaggcaaggtcttgctatattgcccaggctggtctccaactcctgggctcaagtgatcctcttctgcctcagtctccagagtagctgagactataggcatacaccaccatgcttggctaatttaaaaaaaaaaaaatttaggaacagggtcttgctatgttgcccaggctggcctccaaatcttgggctcaatcaatcctcctggcttgacctaccaaagcgccagtattatgggcatgagctgatgtgcccacctctgtactctttatttatcatcatacaaaattaatacttgaatacacacacaacttcaaatctcctccatccccctcccagttttcagctccctttcttagctaatttttcccaaagagttcttggtggttactacttttacatcttcagctcccactcctttttcaatcagttgtgattgtacttccatctccaccactccacaggcactgttcccatcagactcaacacgacctcatcttgccaaatccagtggtcacttctctgtctctgtctttcttcagcaaacactcagggctttcaaaaaagctgaccacttcctcattgaaatactctctccaccaagcttctgcaacactacactctcctgtttcccttctaagttctgccttcatgttttcaggcccctcctcctctgtttcagctctaaataccagaggaccagagagctgtgttcctgttccttttctttgtaatttttaagtcatgttaccaaaccaaaccagggtctgctcactcagtgcagtaaagccaaacatctacaccaaggttttgcagcaggggggaaaagaaggcatttatctgcagggcaccaagcaaggagaatcaggcagctcacactgtaagagccaaccttcgcaatagcttacaagcaagagtttttaaaagcagggataaatttcagggaagtagaagttacaggcagaattttaaggcatatgtggaggttatatattgatttggcctaaaaagacagtatatattgaagcaggaacttacaggtcattggtggattcgaggattttctgattcgcaattggttaaggaagggaaactttgtctaaaaacttgggatcagcagaaaggaatgttaggtctggcccatgggtatgacgtcctttaggctcctaaggaagaagtttagaaaaaagaacggcagtcagagttcagttctcaatcgccccttatctgaggtctacatgccagtggatccatttggctggggtctgtgtttctgaaaagtagctcagggacatatgttgagatgttgtctttagtttctatagggaaccaaacatctcaggactctaactaccttggctattgttttcagctactattatcttcttgcttatcaagttgcttatttacttctcagggctagtgaggcggctagttcactgcctagaatttccccggaaggaactcaatattttcctctatttccatgcttggcaagggggggaggggggccctaagagggatccctgctccgtttctgtcatgtgaccttagacgagcaacttaatctttctgagccttaatttcctcaactataaaatgagagttaataatagtacctttctcatataattatatcaaagtcaaaataaacatgtagagatgaatccataaatttaatattttatttgggaagaaagaattgcaatttgggccatacatacagacctggtggtcttcgggtatgtccgaatagcaaagaacggcttagcagttttgaaacgagaaaagttcccttattcccctcgcagggcgtgtgacgggggtgtggcgcgcttcttcagtgccccgctgctcacacctctagggggagcatacagacagacggtcgggttgtgaggctccgaccccatagcagtgtctaggggttaatgtttacagctgaagccccagtgggcctgtgttacagggtgctctttcagtttagccgtccgtaggcggcttgtgctagtcagctcaatcagacaccctgccttatcgcagggacagagggctttctgtatcatggggtttcttgccctggtgtaccagaagaatcagatcacacgtaggcttggagaatgagtgcaaggtttattgagtggaagtagctctcagtagatgggggagccagaagggagatggaatggaaggttgctttcccctggagccaggccgcccagcagcggggcttaccttataccgccctggccaaagtccgtgtccttccgcgggttgatggcctgccgccctgctggcctaccggcgtctgtcagtatgttcttaggccagtgcgttcctctcaacggctaggtgcttgtgtctttttccactgctgtgatcctctcaatgtccagccgctggtgtgtctgcccactagggtctcagggtttttataggcacaggatggggggatgggggcatggtgggccagggtggtcttgggaaatgtaacatttggacctgaaaacaaatgcctgtcctcacctaggtccgtgggcacaggcctgggggtggagccctcgccagggacccgcccttctccgcccagcacttccctgccctattccgatatcagttttataaaaaaggagaaatgttatgtattcttctttgagaaagttcattggcataagaaagaatttagggagtcagaaagcttcaactggtgaatggtggctgtgggcacaattagtgctagcctttgcagcacgttatctcagaagatgagataaaactggtttcaggttacaacaagcagtttgggcttgcagagaattacattctttcagcaatgttgtaccctgcgtgcttgttccccctggcttctcaactctgttttagttgtgagtgacaagaatgacccaattcttatgatcaactttcatgattgttatgagaattaaacgaattaacacctgtaaagcatttgaaacagaaccagccaggtaatgagtcagtgcttctcaaattttaaggcatattagaatcacttgtggcttttaaaaatcttgatatccagcccatataccatagcaattaaattaaaatctccaaaaaattctctaataactaattaggcacagggttttattgttgttattttgttttgagacaggctcttgccctatcagccaggctggagtgcagtggcattgtcagaggcctttgaaccagagcaactccatcttgaaaaggggctgggtaaaataaggctgagacctactgggctgcgttcccaggagattaggcattctaagtcacaggatcagataaaaggttggcacaaagtacaggtcacaaagacatgtacattaattatatgcactaactataatgcattatcatgctaaaagatatgcccagcagtgccatgacagtctataaatgccatggcaatttcaagaagttaccctatatggtctaaaaaggggaggaattgtcagttctaggaattgcccaccccttttctggaaaactcatgaataattcgcccctcgtttagcatataatcaataaacataaaaatcggcaaccagcagcccttggggctgctgtgcctatggagtagccattcttttgcttctttactttctcaataaacttgttttcactttatggatatgcctcaaattcttgcgtgagatccaagaacagcacaatcatggctcactgcagccatcttgggttcaagccatcctcccacctcagcctcctgagtagctgggactatagataggggaaagtcaccacacccagctacctttgtttattttttgtagagatggggcttccaccatgttgcccaggctgatcttgaacttctgggctgaagctatcctcacacctcagccttcctaagtgcta

SEQ ID NO: 126 - DNA, 501223 bp, Homo sapiens
  source 1..501223: mol_type = genomic DNA
aaacttgagtgggaaagaacttcgttcacattaaacatgagaaaaggcccagaagttgaaaagcatttgacataattaaagaacagcaagtcagtgccacttaaacggtaatccaaccaccgccagtcagtgaacagctttttactgctccatgaacaggtaagtatagaaattgtgagtaagcatttagaaataaaaacaacaacaacaaccaataattgaaaaactaattttatactttttggcatactcattgtacacttgtaataaaaactgggcttgtagtttttgtctcttttcttatttgctagcaggttttgatttgtattttacagaaataatggtccatgtcagattggaaataataaaaacttgtcttttacccttgatagtttgagaaaaaagtaattcagtggggttagatatggcatccgagagatgattcgggaaaggtgggccagggccatgtttatgtggaccctccaatgcctcagagttcacacttgtttcagtgggcaacaggactagtaaggtttagagggactgttaaccgaaggtgagtggactttgcacattttatggtattttttttttcccagtaggcatgtgcttattctttcttttcttttctaattaaaagttctgtttggtttttttagttaagaggagagactggaactgctcagtgtttcacaaagataactgtttgtatttgataagagtttcgttaaacaaaggaatttgcacttatcaaaacataaagcattgaaaacactgagcacatactctgtgaccagaatgcgtgtgacttgttgagataagccacaccgggtaatcagatgagtctcctttcttcttgggcaccctcatataattcaggcacaaacgaaagagaaaacgctttttctgatctctcagttcgggtcatctctgccttccatcatcaccgcctaacaatcctacacctggcagggtgggaaaacggtttaataatctcttccctttgggaggcgtttgacagctcagaaagcatggcctttactcaggctcagagacacacaaaaacctttcacgttttcctttcagcttcgcagccccgtccttctccacctgcacgggcacccactgaagcacaggacccttctgccaagccatgagccttctcaggcccctgccgcccgcctcgcctgaggctgcgcttctgaaaagcacgcggccctggcctgcgcaccacccagtctgaaggcgacgcccctgcacgaaggagtcaggcctaggggctcgggacccagggcgacactcaattttctaacaggagccacagcccagaagctgagaagccttccggccgatctgtggccctgaggtcgcccttggagggcgagtgagaaccccccaggcgttccggaggtggcccccagcccgaacccggcgcccgccccggcttcccgagtcaggtctttgccccgcctctcggccccgcggcctggccggcaagcagggctgcagtcacggggcggcgcggagggccccagcccagtcaggggtgtggccgccgccaccgtaaggctaggccgcgagcttagtcctgggagccgcctccgtcgccgccgtcagagccgccctatcaggtgtgtttgcagccgaactggcagtgcccgcgggcggctgggccgaggccttggctcctacccgcgggggtcgggcgggctgaggctggagcaggccaggggcgggggcagagggggacggacttccagcatcgctcattcgggggcgtgacgggaggacctggctggggagcggcgggttgggagcctgtggctgccccttcggtgacagtggagtcaccgagcctagaaatggggaagctgtgacgtgggggtggtggagggtgctgcgggacagcagcgagcacggccctcagccgtccttcccaacacggtttcacttcccctcagctccagggctcagccccaagccgcccccttcatcccccatctgcaaacaatcctggtccccctgagcctccaatatgccttatgcagttcttttggggttcctttcgcattttaccgtgtactttcgcttttgatgcgtctagtttctgctactggactctcctagaatcgaagttccatgagggcaaagtcccatctgacttaggactcagagctactcaataagtaattgaatgagtacctatgccgtagaactgagtgaattaacaaatgagtaagtgaataaatgagtgcatacgagatacagctgaatcaatcagtgcatgagtgaaaataaagatgtatgaagtggaagcagtggagacgcaggcttacaactcctgttttttgatagctttccaaaaagttgtgtgaatgtcgcacttttgcaaatggaggcattctgattgggaccacttaaaaagagttctatgctgttcaaatggtctctggaaacgccccctggtatttccatttttgttggacttggctatatgtgtttgcttaaaacaaaatatgcctaggttttttcttgcttgtgttttgttcacttctactttggacgtttaaagaatcattgtcactataatattatttcatgtatttcttaaagataagggtgactctgaaggcagaaccatatgactctgacttgtttgtaaaaccaggcttttcttttgaattcagagttgttaagaatcttgtctgttttcctgagacaggtgctggctgatttgcaggtgactgaagaaggctacataaggcccagaaagacgcttatctgtttgtaaacaaataggcttagcacatagctttaatacagttggtcactgcagccgttcttacttgccaggtccaggttccagaagagctggatgaccttggacttgccacttgatctctttaggttttaatttcttaatctccaaaatgaagatgtttagctaggaaccctgcctgagttaaacctctgggattcttttgtatcagggttagaaggtgaaattacagatgatttcatggagttctgcttacttcacctcccatagcattttgtctctgctctcttctttgctgtttacagctcatttcctttcttctccacatctgcaacaagaaagcctgggagctcaagataagtgtaataaaccctaggctggtggggagaaaggagggtaagattttcttctacattgtcacaggctcctggtcctgggtctgacttttttccagtgcaacccagtctgacaatgccatatattcccagtatatctggggaactgcatcactatttcttcgcatgcatttgagattagttatcatagatcacattttggagctggaaggaccttggagattttttaaaggcacttcaaaagtcattatacatacatatttaaatatttttgcatgctacatttaacaaacacaaagttccaaatgtgttaagtaaaatgaaattaatgttacctacttcagtgaattcaagtttataaggagaagtggaatacacatgttgcttggtgaaaagggccaactttctcacactgttttcccaatgaggtcatgtgtcatacaggcatggaatgttacaaagctgatatttatggggcactgaccatacaccaggcactgttatatttaacctttttacttatattgccccatttaatcatcactatatatctaagagctagatactatggtaagtcctatttgatcttcttaactagaaacagtacatggaaaatgggagagttaggactcaaaactcaagcagatggaaacagggtttctcccagaaacaagacaatcctgccaggaaaaactgtgtgactttgaagaatgtggtctctgtgtgtgttcaagcatatatacaaaccctgggttatttgggtaaatgaatttagaatgagagcacagggtgaaatgatgaagactgaattataggggagttggttgttttatcattttgaaaattattgaattccattgagattccaggagactctgatactttgacctaggtgcccatgcatcttaattttaaatgtgttcagacttaccaatttagggaatataaaatgagtgacatcgacagctgccatcagtgaatggcacttaagggctttgaaccatgagtgctaagcagtgttgtttcttggactagctttgtgcccttggtaaggcactgcctcccaacctctttctttataagaccaacaacccctagtatagacaaagaacaatgcctacatctgtgtaatccagagacaagaatgcaggatgggtttccagaacccttataattaattgaagagagcaaaagacgaaaagagaggcccataaaataaatgggaaattattttgtttctttttcgtcagccaagtttagccccatggaaagcagagaccagttgtggccgcctgaaaaactaagagctgatgccagtttgatttagctcaggaggctgaaactttctgccccgaaggctggtgtgatggaatagaccttcccattgctcacaatattatgaaaaaaacattaaagcaacaatttttattacttgccctgcagctagagctttaaaatgtactttcttctcccctaccctccctaaaccacttagcttttaaaaacaaacaacccattcatgtgtttgttacagtcacattattagttctttctctttattcctgggcccttttctttaatgcagcaaagtatttggagggatgtacttgtggatctgtggaattttactttattttattcagaaaatattaatttcaataaccatttattgagtgtatactatgtgacaggtaaagatgaatgagaacaaatctaaataggagagtgacccatctgcaaacaattgcaccacagggtaatgtggaagtagtggccactcactcttccaggaaagaggtatgattggaactcaggaagactttgcagagaaggtgaattttgaactgtgttttaaagcctaaagaccaagcagagggagaagggtattccaagaatggagaacaacaagagcaaggaaaaggaggcaagtatgaacatggcattcttcaggagatgggagttcagtgtggctgtggtagggaggtgtggtaaggttagggccagacagtgatggtccttgaatgtcatgttatttaaactttatcacagtctagataatccttttcagcattatttttgttttgttttgttttgaggcaaggcctctctctgtcacccaggctggagtgccgtggcaagatctcactgcgacttccgcctcccggttcaagtgattctcctgcctcagcctcccaagtagctgggactacaggcacacaccactacagcctggctaatttttttatttttagtagagacgggactttgccatgtgggccaggttgatctcgaccttctggcttcaagctatctgcctgccttggcctcccaaagtgttgggattacaggcatgagccactgtgcctggctcttttcagcatttttaagctgaattttaaacagaggaatgatatgattggattttccttagaaaatagctacagtaataatgtttcagaagaattggggaaggaagagccagaaggccacaggaaaatgaagatgctattgccataggtctaatgaaataggataaggatctaaactaagataggtttgagagactatttgaagacagagcaggattaatgactagctggagctggatatgggaaatatgtttgaaaataatctgaggttttggaattgcttaactgggtgagtggagatgccactaatgagggtaagaaatataaggtgaggaagaagtttcgggagaaagacggtgagtgagcagaggtagctgtggaacatctgggtggagatcccaggatatagccttttctgtagctgtgctgtgatgtcacacagtcaagaccttggccaaacattacaatagggcctcagtctaaaaagacacatcaatttaataactcacttaaaaaatacatcatacttatctaatgaccattacattatatttcaggcaagttattagagaactctgattcttatgtaagtgccagtgaaggaaaaaagattggagactcaaacaatgaggagttattataagctgccaggagaaactgaaaaagagaaatacagaccagagtcattcaaaggaacaaagataaggaaatggcaggagtgttgcagaaagcagtggtttctgaagacacaggtataggcagatatgaaatacagagaagaaatttgagctggcgcttccaaataactgtacttctttaatggtaagatatcccaagctttgatttctcatcttattcagtttgtcaggaagagacaaacaggtgtgggtgctgggcagagggcttgatctcattttgcagagaaagtgtttggagactttgaactaagcaaagagtaacagggaaaataagataaaaatgaaaagggtaatgattcggagaaatttttcagagaatttaaggaattctatgacaaacaggtgttaaagaaaaaggcagatcaacgcagtgttctcttgatatagtggtattagacttccttggaaaaaagattcgcatagcgccttatatttaaaaagcaattttatatttgattgttacaagaacctaggaagcaggtgcagccaggcattattatctttcttttataaacttaaaatctggcatgaaggaggctgcagtttgtttcatggctcagacggctcagatcccatggctggcagggactcagagccttctgactttgggtccattgctttgtccattgtatcaacgccttgccttaccttggaaccttggccttctgcagtgtgcctccttcccttatcatatcatatcacataaatgtaaaagtaaagcagatggtatttgaagaccaaaagagccaagatctctggggagacaggcagtgatgtgaaaggatccttagcactgattatgctatatacaatagggatgttcatgaagagttgtgcatagagtgttatctacgtaaatcaaatgacactttcagtgcagtaggggagtccacaatatccaaagtgttatgattaaattttttatgaggcaaataatccctttataaaatgaacaatcagtcactccttgatatattatctgaataaatccagattttcaaatatggggttgacttaaagcaagatacatctctagtagcctacatctatatttatcatatatgaagatttttctgacttgggtattgaatatgaagatggggatctggagctggatcctctaattgttagagaccatttaaaatacaatggacatcatgacttgcagctaaatccattcagctacctttactgtttaccaagcacctaacaggtatgccattggatggggcaaaactcagctgggaaatggagagagaagcccagcactggcactgccttgagtctgacagttagaccacaagaaagtcataaatgtaaattcaccaatatagtgagccagggtaagaaaactagaaactcttatggtccttgaattctacatcagtattaaaatgaaaccaagtatatttcaaagcaaagactgttatattagacccagagttattctgtactgacaaaagataatctttgtaaggaagaagaggtagttgtgactctttatgcatcaaacatttaaaaatgcatatctttaaaacatgtaaaactaatgattagatctatgagaaataagcgaagctatttgtaggacactttagatctgttgttttacatgacaaatcaagtagacaaagtcaaatggtaatacacaagatttgaataatataactaatgaggttgaataatataatttatgagtgaatagggatatggaacatttaatagtatattttattattaatcaaaaaattatgttatgtatgaatatatatgtacatgatatatattgggatatatatggggtatatgtatgtatatatgtctccttttttgcattaataagttcttttttattttactgtaaattggcaaattatggttgtatatatttatgaaatacaaagtaatgttgatatatgtcataatacaaccttccatacaatgtggaatgattaaatcaagctaataaacatacccatcaccttaaatacttatcatttttgtggtgaaaatatttgaaatttgctctcttagcaattttgaaatatacaacacagtataattaactatagtcatcatgctgacaatataatctcaaaaaatttattcctcttgtttaattgaaactttgaaccctttggcattccccattttccccaacccctcagactttggtaagcaccattctactctacgcttcttagttctgttgtttagattccacgtagaagtgagatcatgtggtatttgtctttctgtgcctatgtctggcttattgcatttagcataatgtcctgcagcttcatccatgttgtcacaaatgacagaatttcctcatttttaaaggcagaatagtatttcattgtgcatatgtgccacctattctttagccatttatctgttgatggacacttcggttgattctataatttggctattgtgaatagtgctgcagtgaacatgggattgcatatgtctctttaatataattatttcaaatctttggctatgtacttagaagtgggattggtggatcatatgatagttctatctttagtttttttgaggaccctccatgaagttttctgtaatggctatactaatttacattcccatcaacaatgtataagagtttcctttacttcacattgtcaccagaatttttttttgtttgtttgagacggagtcttgctctatcgcccaagctggagtgcagtggcgccatctctgctcactgcaagctccgcctcccgggttcacgccattctcctgcctcagcctcctgagtagctgggactaccggcgcccgccaccatgcccggctaattttttttgtatttttactagagacggggtttcactttgttagccaggattgtctcgatctcctgacctcgtgatccgcccgcctcagcctcccaaagtactgggattacaggcgtgagccaccgcacccggccccagaattttgtttttgaggcaggatctggttcttttgctcaggctggagtacaggggcgtgatcttggctcactgcaacctctgcctcccaggctcaagccatcctccctcctcagcctcctaggtgactgggactacaggtgtgccactgggcctggctaatttttgtatatttgtagagaaggagtttcgccatgttgcccagactggtctcaaactcctgagctcaagcaatctactctccttggcctcccaaagtgctggattacaggagtgagccacagtgcctagtacatttgtcattttctgtctttttcataatagccattctaactggggtgagatagtctcattgcagttttgatttgcatttctttgataattaatgatgttgagcattttttaatatatctgttggccatttatatgtcttttgagaattgtctgttcaggctctttgtccattttttaatcaggttgcttgttttcttgctattgagttgtttgagttccttatacagttcatccttgagcaatgcggggcttagcggtgctgactccctctacagttgaaaattctagtataacttttgattcccccagaacttaactactaatagccaactgttgactggaagccttaccagtaacataaatagccaattaacacatattttgtatgttacatgtaatatatactatctgcttacaatagagtaaggtagagaaaagaaaattttattgagaaaatcctaagggagagaaaatatatttactatttattaagtggaagtgaatcaccataaaggtcttcactcttgtcatctttatgttgagtaggcggaggaggaggaggaagagaagggattggtcttgctgtcttaggggtggcagaggtggaagaagcgaggaggtgaaaggcgagggaggagaggcaggcccacttggtgtaactgtctggaaatacataataatttctgtatggctacttttctctttctaaaaatgttgtaaagtttatcttaaaatgtttctatacagtatcagtctttcttctgctatttgcattagcttcagtgcccatatcatagaagcgttcatgtcataaaagaagtcaaatgcagtcttaaataatcagaacgcttctgccagattgtctgatgttaatttgctttttggtacttttatatcctcctcatcatcataaggcactggttcagaagcactccgtcaagttgtcttctgtcaattcctctggtgtgtagtgtctattagctcttgaatttctccaagattcatatcttgacaccttcattcaccaccttttttcccactatatttacaatcgctttcattatttccttgaattggctttgtcataaaccctgtgaagtcatacacaacagctgggcacagttttctcctgcaggaacttattgttggcttgatggctttcacagctttttctataacaatgatggtgtcttcaatggggtaatccttctaggctttcatgatgttctctctatcggggttctctaacatagcactgacatcctttccatagagtactgtgtataatgagccttcaaggtccttatgatcccctaatctagaggatgattagagatgttgcgtttgggggcaagtaggacacttggatgtctttgatgttgaactcatggggttctaggtggccaggggcattgtctaatatgaaaataattttaaaaggcattcccttaccagcaagatactttctgacttcagagaaaaagcatcagtggaaccaatccagaaaaatagttcttgtttaagccaaaagactggtagctgatgtttatctttttccatcaaggcttggaggttagcagctttatagatgacagtcctgaccataaacctgactgcatttgcatgaaacagtagttagcctatgccttcctaccttaaatcttggtgctcacttctcttccttactaataaatgtcctttgtggctttttttttttttccagaatacagcatgttcagctgcattaaaaccctgtttaggcaggtatcctttctcctcaatgattttttaatggctttgcaatatagtttgatatcaggcagtgtgatgcctccagttttgtttgttttatttaagatcatcttggtgattttttttaattccctatgaattttagggttattttttctgtttccttttaaaatatactttctggccatttttctctctcttcgtcttctgaaattatgtgaagattagttcccttgactgtgattgtgtcacataattcttgtaggttttcttcatcttttccattcttttttctttttgctcctctgatgaataatttcaaatattctgtatttagctcattgattgtgctgcttaattgagtctgctgttgaagatttctattgcatttttcaattaagtcattgtattctttatctcttgggtttcttttttattgtttctacttcttctatattctcattttgtgtattgtttctcaaatttcatttaattttatatccatatattcttgtagttcactgaactgctttacaaggatttttctgaatcttttttctgccactttatagatcttcattttttagtctgttattggaactttgttagtttcttttgatgattacagatgctctttgacttacaatgggcttatgtcctattaaacccatagtaatttcaaaactttgtaagtaagaaatgtgtttaataccccagtaaaccaattgtaatgtcaaaaaattatgagttgaaccatcataagtgcagatgctccttgacttacaatggggttatatcctgataagtccgttgtaaagttgtatagttgtaagttgaaccatcataaattggggaccgtctatatttgtaatccttgtgttctagcattggtgtctgcacatttgaagagacagcttcctcctgagtgcagtggtataatgacagctcactgcagccttgacctcctgggctcataagattctcccacctcagcctcttgagtagttgggaccacaggtgtttgccaccatgcctggctactttttgtattttttgtagagaggggtttcaccatgttgtccaggctggtcttgaactcctgggctcaagtgatctacttaccttggcctcccaaaatgctggaataacaggcataagccactgcatccagccccaacagcttgctcttctggtctttacaggtattctttgtcagggattgacctttacttcttagtctaggctgtgattctagttgggtcaggtggtaatgaccccatgcaggcagagctcgctatagttggctgggtgctgcctttgctctgaggtctgatggggctgctggctcggctcccatgcttcggggagaccactggctgagctctgctataatttctgattggacaaggttgtagggtgtacttcctggctgggtggtactacttttttggttcaacagttgagcagggctgcaggctggactctgagtttaggtggagttgctgctcaggatggatggggtctggagtatatgctgcatagaactgcacagttgaggattgcctgtctctgggcagggccttagagtgggctctgagtctggattgagtcactctttggatttctgcgtcaggcaattccaacccctatgatccacagaaatgccctgtgatggtcatctccacatctcccgcctgggtaaggcattgaggtcgcctctgaggctggccgtctaaagactcaaagcaggctgaccttctcatcatgtttctgtgaacagtgaacttggctttgcaagtgagccataccattggctggtatctctgattgtgcaccaccactgggaggaacatagagccatcaccaaaatttgcacactggtccctgtgagctctgcctcctttctttgtttatacctaacccaggaggtctagccatgtcattactgccagtattccccatgaggtcagatgggagtgggctttctgggaagtgtctcagaatgctagggagctggatgtctagaaactctggttaccttttttttttttttactgtatgggcccagttaaaaagatcctcttggctgggcacagtggctcacgcctgtaatcccagcactttgggaggccgaggtgggtggatcacgaggtcaggagattgagaccatcctggcaaacatggtgaaaccccgtctctactaaaaatacaaaaattagctggacgtggtggtgtgcgtctgtaatcccagctactcaggaggctgaggcaggagaatcacttgaacccaggaggcagaggttgcagtgagctgagattgtgccactgcacttcagctggggcaacagagtgggactctgtctcaaaaaaaaatcctctctctgtgtgtcaccatgctgatctgggggagcaggaggggcagtgtagtcaacgtgagattgttcctcttctaatgtggtttttatttgattcagtggcctattcattcagctgtctccgtttctttctcaagtttgtaagttttcacaaaagtgttcttgtctttggattgttgcttgttggactttctgtagagggaagtgaagccaagtgaagcctgggacttcctattctgccatcttgctgatgtcatgcctacatgtttacagaaaattcacatcctcttataacatttatgagacattgtaaaaaacaaaacaaaacaacaacgacaacaaaacccaaaagccttaaatgaagactttagtgaattccagagtccttcttactcttactggccttgtgccttagccctctggtttagcccctgtttccagctagcttttaacaggttgagatgatgaaaagaaaacatacctctctcctttcataatgctgtgaagtagctcatataattcatcttccacgtttatatacgtatgtctcttttgtgcccagagcatcattttgagattcttttttcattatcaaaatacattggatctatgttattcataactaatctgaggctgtatttgttacatttgagtattttaaatcattaatgccatatgtattgtataccaaaatttaccatctaaaacacctggctattcttttgtagggtttttcttttcattagcttttttgagctaaagcttaaagaaaatcagggaccaaaggaaggttagaaagtggctggaggtatcataaacaccaactaagttctttgagaagcagaaggtgcatcatggaaatcagcattattctgacttcatttcattgcctactcagtccaaattttagggtttacaacttaaactaataactcactggcaccttgcatttcctgtggcttaatggttaagaacatgggctttgaagtcattgtcctgagttcaaatttgaggtctaccaccatcacctatgtgactttgggccaaacacatatactctttatacctccatttcttcatccataaaattgggataaaaattataactgtctgcagtgggcagaatactgtcttccctaccaccccctacggtgtccatatcttaatccctgaaactgtgcatgttagattacattgcaaaggggaattaaggttgcagatagaattaacattattaatcatctggccttaaaataggaaattatgctggattatcctggtgggcccaatgtaatcacaaaggtctttaaaagtggaagagtgaagcagaagaagtcagagagttaggaagatgtgattatggaagaatgttcaaagagagacagtgccactggctttgaagatggaggaagggggccatgagccaaggaatgtgggtggccacgagccaaggaatgtgggtggccactagaaactgaggaaagcaaggaaatagattctctcctaaagcttccagaaagggatgcagtcctgccgataccttgcttttacgtgatgcatacagtgtcagacttctgacctaaagaactgcaaaataataaatttgtattcagataccaaatttgtggtattttgttacagcagaaataggaaataaatgcaccgccatatggggttgttgtaagggttaggaaatgtaaacctttaagatagacctgccacatggtaaatgctcagttagtattagccactattattatccattggtactttagtttcccttctgtctttgctcttttgtggtagttgtcttgtaattacccaaatttgtggttatcttccctacaaagactatggccctaggtgtttttcactctcattttagtctatactcagcctccagtaatttgtcaaaattaccatttcagagttcctaccattttgtggttccagcagcttctgttccaggtgagtagatcttggctgtgactctctggatttgcctgtctctccagattttagggtggtagtttgccctgcaacttcagttctgtggggcatccaaggaaagtcgctggttttcactttgttttgtttcattattgtaaggacatgagtgctgacttccgagttctttacatgttggtactgaaattggaagtgtgggcagtgctctttaccctacggctttaataatctttctatacacatgagatcttcatctctacactttacttctttctgatttccattatctggttttcacttcattcatttcatttccaaacatgctttttctgtattttctatttaggttagtggcatctcaatccaagggatagtagttaatttgatgtgtctgaaatacagggtacaaaacaggctcatagtcggggagattgcccttaactctccacctttcctgaatccttttcttcagaattagtaagtcgccaagggctgttgtgtctatgaattttgcccacatccttgctgtcattacgctagtcctaactcttgactcggccatgcagaatattttaaaccactttatcctctacactgcctcagagttagatcataagttggatcatgttacttcctctctcagaagacctacattttgaaaaattgcttgtggaataaatcccaaactcctaatttggcatttaaggttcttaaagatctgtaattaaggtatatttctaggtggattcatagtgcatgtacctactgtatttgctagtgctaccacaacaaaatcctgcagactgggtaggttaaacaacagaaatgaattttctcatggttgtgggggctggaagtccaagatcaaagtgtctgcatgtttggtttcttctgaggcctctctttttggcttgcacgtggccatcttttctcgaggtacttacatagtcttctctctgtgcatgcacacccctgatatcgctctgtgtattccagtttcctcttcttatatggacaccagtcagattcttttagggcccaccctgatagtctcattttaccttaacacctctttcaaagccccattttcaaatagtcacagtccaaagccctgggggttagggctttaacgtatgaattttggggaacacaatttagcccataacaccgactgtatccctctatgtattctgtactcatgaatgtataatggatcacctaggaagatttagaaaatactgatttgggggtctcacccaacttcttgtaggttctgaatcagtaggtctgaaatggggctgagaatacatttggtgtgtgtgtgtgtgtgtgtgtgtgtgtttatacttctccctagtgctttcccagctttcctagactctttaacattattggtgaacatactataaatgttcatacctttgctcatatttgttttttaactgaaaattctcttcctaccatacctatgaaatttaatatctatgaaaattaattcagccttctaggctgatctgaaatatcatcttttctgttatctttttcttattctctccagagataatcctgcaatactttgttgtgattttattttactttatataagtactgaagaatttattttgttttatatgatagtcatttgccttcttctttcactagctttctgagaccaaagaggacatattctttatttctgtatatatgaaacagtggcagttgctctgaacatagtagataattaatcaatctttgcagtgtgaaaaatgaactagttaagaaatgctaatatttttattgtgactttttataaaatggagatcattgggtaaaaaatgaacatatcaaatgtaaaacaagtggcagacttttttttaaaaaagactttacttttttttgaaaagcagttttagattgagaaggtgtagaaatatcccatacactacctgcccctcacatgtgcattccctaccagagtggtacattcgttgcaattgatgaacccatatagacatatcatcatcgcccaaagcccatggtttgtattagcgttcactcttggtggtgtgctttctatgggtttggattgccctaaaaatcccctgtactctacttgttcatccctcccttcccctcactcctggcaactactgatcttttctctgtgttcgtagttttgccctttccaagatgtcatatagttggaatcatacagtatgtagtcttttcagattcgcttctttcactgagtaatatgcatttacttctcctccctgtctctttatggcttgatagcacatttctttttagctctgaataatattccattgtctgggtgtgctacagtttatttatccgttcacctactgaagatcatcttggttgcttccaaattttggcaattatgaataaagctgctctttacatccatgtgcaggtttttgtgtttacatgttttcaatccttttgggaaaatattaaagaatgccattgctggattgtatgttaagagtatgtttagttttttaagaaactgtcaaactattttccaaagtgggtgcaccattttacattctcaccagcaatgagtgagcattcctgttgctccacatcctcaccagcatttggtgttgtcagtattatggttttgggccattctgctaggtctgtagtggtatcttgttttcttttccatttccctgcttacatatgatgtgaagtatcttttcacatgtttattttccactttatatcttctttggtaaggtgtctgttaaggtctttgggtcattttttaattgggttgtttgttttcttgttgctgagtttttaagagttctttgtatattttggataatagtccttatatttaatatgtcttttgcaagagtggcagaatttttgttcattatttttttcttgaattaaatatccttaacattacacataaacagtatttttaatgtgtattttcaatttggaacttttaacatttaaaaatttctcttgatgaagatatgtgataataaaatggggggcaaagtgaagacattgtaacaatttttgataatcgcatcttcttctgcattgcatttttcagggcagagtattaatggtccagttcttaaagataaatggattcctcaatgtttatttgtagtatatccttgtttattctcctaatgaagaactgcatccttaaagctggcataattaggtagacttgtctattagctgagctactaagctttattttcctgggccaatgaataacagaaacaattctcaaaataattaaatctgttaagacccagttttggggtaaggagctggggtctggcatttcctttttgttggtttttcaaaaattattaaaacttcaatgcttggccaggtgtggtggctcatgcatacaatcccagcactttgagtggcaggcagatcgcttgagcccgggagttcaacactaacctgggcaacatggcaaaacctcaactgtacaaaaaatatgagaattagttgggtgtggtgtggcactcctgtggtcccagctacttgagaggctgaggcggcaggattacctgagccctgtaagggtgaggctgcagtgagccaagatcgcaccagcactccagcctgagctacagagcaaagccctgtctcaaacaaaacaaaacaaaatctcaacgttaaactttctagagaatgggtaatcacctttcaagtcatttttccaaacccatttctgaaccaggacaggcaataacagagattggcaggggaaggactgatgtctcctcacaagggaaaaaggactctgcattgaaaacacagatgagcctttggatgtggaaatttacaaggctcagagagccccgaaacatcttcagaagtggagcccagcagaataatgggaggctgtgtgctggcttggcactggagactgtctggcacaaactacactgtaaacaactcctcaaacattttcatctgcatacatgacattagattctccaaatgtccaattaaacacttgtcaatggaagaaatgtttgtttcctcagctgacctgttgtcagccttggccttcctgatggggaagcagtttcagctgatactgttgtatgctcttcctttctgggcctgatcttgtccctgttgagaactgtggagactgtgccaagctgtggaccatgggattaggttaggtaactaaagaaaatatccaggctgtgagcacttttcaaacctaagaaaatctttagtttcttttgcacagttgtaaaccgtttgtgcttaaaaaattataaaagtgattgcagttgagatagagaaaagagcagtgctgatatgtgtttatatacttctaagggctgacttcatttttttcaacatcttaaacttctattgaacaaatattgtgtgtgtaggtgtgtgtttgtgtgtgtgtgtgtcatcatctctgttgacagaaatgctcaatgataagtctctgtgactggaagagcagtgaaggacttggacacatgctgtagaaacataaaggaagtgaggaaggcaatattggagaagaatcaaaggagtttaaattattctttggaaaagttggagtttataaattaaaaaaaaactgtatgaccttgagcaaatttctatttttactagtgtcagtttcctaatccataaaatagggaatataatgtcaagaacatcgaaggttattattaaaattaaataaaatgatctatgtaaaatgcagcaacacttgccacattgtaaattctcaagaaatgctagctaatattgaaatatgaaataatacttctttggtccaaagatgtttaagcattcctatttggtaaagagaaggagcaaaagaacaagagaaaaattagataattggtacagtatgaacagagtatttggctttggaaaggagggtgggcagttctttcactgggacaggagctcagaatgactctataggtaaagggatagaagaactttaaggtgaggatgaagaaagacaaagcatgtcatggtcattctattgtctcttcagttacgtagaagaggagagctttttctgagcatgagggggaataggagtgaaatttgaggcttaaagagaatggaaaagtttcatagcagctgctgtggagaatttgatacgtgtcaactgaagataaatataagggttgtgcagcaatgcagaggatatggctgaggtcagacagccttagtttatagtggcatgattttgggaatgtagatgatggcattatgtaccctggagcaaacacagagaaaattcaaaattacctttgaggaataagaaaggaggtgaggagtaagggtaaaggcgtcctaaggtgctaatgaaaatgctgttgaaatcattaaccaccaagtaaagttgtgagccaagattaatctgaaatggtgatttgtgtggatagaagtacaaatagactggaggtggggaggcccttcactggacaggcaacattaatctagctgccattgtaccgcacacatgctgaatgatgatgatacaggaatgaaggaaacataattcacttgggcagctcaagagcatttttttaagctcttagtatatactggctagatcatccatatgacagcaatgcttcccttgaaaagctttaagtctagtgatatgctctggataatttaaactcagactgtggggtactttgaaggaggtaagcagagggtccgaggaaacaatagaagaggacattcaacatgacctgtgaaaagaaagggcaggtcagtaaaagtatcctggaaaatatcttgcttgagctgaatcgattgtagagagccagggtaaagaatggcagaaagggagaggcaaaagcaagggagaaaaagcaaggaaaaaacagagcaagggagtgatttggctagggcagacaaaagatttcagagaagggataattaagatgagttacatatgatactattactaagtgagagaaataaggaagacatgaatgaaagtgataaacaatgtgttggtaggaacagaagaaagaatgtcaagagaacagaatgatgagatttaatgactgattgaatacgtggggaatgaatgggtgattttacactcttgatcctgaattatagggacaattatggtttccttaacagaaagagggaaatcccgagttagggaagatttaggggaaggtgatgagtttggagatgttgaatcagaacatatggtttcaagtgaaagtaattcaaccaagatgggattaaaccaaatgagagaatttgtgatgttcataattagtaagttcataggtgcttctggatttaggcatacctggctctccagggttcaaatatgatatgggcttatctctattcctatgatctctgtctcttagattagcttgtcttgcttgttttcattccaaagacaggctctcagtatatggtaggcaaatgggtacctccaggttcacattccagcgatcccggtggaaataacttttatttgcaacatccatatattttaaatgtaggttttattattattcagatatggtgaggccaggagattaggagaaaattgccaatggaaaatataatttgttactcatatctcctatgatatgggggcacacaatgacatgcagaccacacagggaagcaccagggtcagttaggaagcagaaggagtgagggaaagagcctttattgtggggtttgtgggaaggaatggatgagtcaaagcaagtaggcttaggtttggctagtttgaatgattttcgtgggctctgggttgtagagttctttagcaagacgtctggtacctagccctgtggttataaaggcaggagaatattggctaggtgtatgaggatttgataagggaggtcatgctggtgggatgggctttggattggctagtttctgtatgaaaggcatgcttacaggggtgttatttgctatcactagcaattagctaatgctgtgagggacagtccctcctggtccattgagtccctggatgccagaacattaagaatacagaaaataagagaatatagttaatacattgtataccaacgccaggaaagattctgatttgccttacttgagtcattccagctctgtagtttaggtgcagagtacagggtgaggaatggtattgtgattgacagtcaacctagaccagagtgtagggatcagggaggactaccctaaagaaaataaagccagaacatgggaaagtatgctggtaaatcaaaaactgtatcgactggtctatcacaaggtggctagagccgtcttggttgagatgaccaggtggccattcaaatatggctcttggcctctagacttcgaagaggctaaggatttttatttttgttttagcagctctcgtacaccatgtattgctcccgggcttgatggccctcttctgtcctgcttttctaaagcctatatagttcctgagctcagtgttaaaaaccaaactggagttttaggcatcatttaggttttctgattctcttggtgaggtaccagtgttttcctcaatgcctacctcagaaaccttagctttgactcccttcctttcccttctatcaagtcatttatcttcttctgaaatagctcccagatttacttcttccttactcatattagctgttgcctttctagtctctcttttttaatacggctttctgaatattgccagagttatctcactggggaaacatcatccccacttctcccacaaaaaaatctaccccgccatttggacattacagagagtaaatggtgtgtacatattacatgggtgagtgtctgaagacctagattcaagtcacttcacgttcctcctctgcattttattaaagatatttggtagcttacataagaaaatgcatgttttaaaactttttataaatcataatgtagttcagatgatggtgattttttgatttctctaattttgaaattctaattttcaggcttatctttttctttttttttttttttttgagaaagtctcacactgtcacctgggctgaagtgcagtggcacgatctcggctcactgcaacctccgcctcccgggttcaagcaattctgctgcctcagcctcccatgtagctgggattacaggtgtgtgccaccacgcctggctaatttttttatatttctagtagagacagggtttcactatgttggccaggctgatctcaaactcctgacctcgtgatctgcccgcctcggcttcccaaagtgctaggattacaggtgtgagccaccgcacctggccttatctccttttctaaatgaacctctccgtcgccacacttaggccaagtttgtttctatctttatatctttctatattgttcccaacccgaaatccccttctttgctctactgtctgccaactaaatattagctatccttcaaagtgtgtctgaagtcctgtctcttatatgaagtcttgtctaattatctagatcacctgtattctctatttttcttacacttcaatttcactactgattatttacctttaattattatatatcttttattctccacaatatgtttgatgcttctgagggcagggatcctgacttttacttattttgtatcatggacagttctgggcataaatttaaaaaaaagttgctaatgattaattattaattggggaaaagtactaatttgcaataatcacactttggatatagtttgtgagcttcccttttcctcatggggagaaataagtttggattgattggactgacagatgttgaaacaatttggttcagttagacaaattcttattgagttctaggacatatgggtaactgctgaataaatattcatttgttcatttattcagtcaacaaatatttattggatatccattgtctgccccacactgtgcaagttaccataatatatgtctgcaatcagacatttagatattgaaaatctaaacatgaatcttacatggttctcatcttcaatttgctttattacatgaccaaggatgagatcattgggtgattataaagcattgcagaaaagtaaatgatatgcttgtggacatttgaagaagggagtaatttattctgactcgggtagctcagaagaggattcaaagagaccatattcaggaaaaaatgaaacatgtagaaaggaaatattaacactcatgtttgctttgtgaaaattttgcattttacacagtgtgttgttaaaaattaacgtgttggagagtttccatttccaggaagatggagtaaatgtagtttttcctatttgtctcctaagtgcaactaaaaacccttgacattatatatataaaacaaatataagaagactctgaaaggtggagagaataaggcaaaccagctggagacctcaggacctgaggaatgacacattactgagttccctgggtttttctttttgccttgtatatctcagacttagagctgaacaaatgggtaacttggagatgccaatggtgcagacaaaaaaaaaaaatctccagcaaaagcctgttttctctaacaaaggacccaaaaagggataatccagcaaaacaaaacttttaaaaagtaaccactctattgcaaacaaacagaaaaaattgtggccccacccttatgtattcagcaaagactgagtggatatcttagatgtctactctaataaggctgtgatgaggtatctgaatatccctgccagggtagggtcagagaagaccaagtagaggtactttccttcccatcaaccagtaatgagcctcctgctgcccccaccacatccccacttgtgatgtcagcggggatcttggacttgtggcctaattgacaataatgcacctctcccttgccctgctggcatgatgtcagaggagatctagtggacttttaccgtttcccagaagtattgaggccatcttaccacagtgtcagtggataccacatggaggatctacaactctcactttcactcagaatgtatgaggagaccctgcccctccttgagtgtcaatggaacctggacttgtacctctatctggcattgatgaggcagtgacacctcccactctccattgcccctgcagtagtgtcagagaaatccaactaaaatggatgtggagtctcataacataatataaatatctgggtttcaattgaaaattacttgtcacagaaagacaggaggaaaaaaaacctagagaaacaaaaaacagagaagaaaaatagaaaataagaaataaaattgtggacaagttctaatatatcaacaattacattaaatgttaatggcgtaaatgtaacaatttaaaacagattgccagaatggattgaaaaacatgatcaactctatgctatgtacaagaaacttacttcatatgtaaacatataggcaatttggaaaggagagaaaaacatatgtaattgattcttgttaatcatggtagttatgttctgtaaaactgctgtgaatgctgaatttgtaaatactaaactgctgttcctaggggaaatacagagctagattcctgcaagcctctggtcacatttttctcaactggtcaatgaataattttattttatgtgttctgtttaaagacaccttactgagtatatattatcgattcattaactttgaactcattgccaagagctctagaactcatatctgaacaaagcttatcgcacacacatgttttctctgtaaggtacatcagagctttcatttgcttaggaacaatagggctttagtactatgcttgaggccattttaaacagtaaaatcaccaacaaaaagtacaaacatatcaaaaccgtggcactaaataaactgtgagaacagttgtttacagcatgagagctaaaacaagaaggcaaagtatttacttgtttgacctaggctaggaacatgtgtatggagtgactcaatttttttttttttttttttttttttttggctgtactgcacttgtgcacaaatgactgcaaaagcaatgcaagtatgattttggggttacaaataaattttagtgagtaggcaaattagcaaatatggaatccacaaataatgaggatagatggtgtcatgcaaagatcaatcaaaggaaagcagatatattaatatcagataaagtagacttcagatgaaagaaaattaacagagacagacattatctaatgataaaagccttatgctaatgtttataacagctttatttgtaatagccaaaatggaaagaatccagttgtccttaaattgatgaatggttaaacaaactgtgatatatccatactatggaatactactcagcaataaagaggaaaagattatttatataggcaatgacctggaagaatctttagggaattctgctgagaaaaaaatcaatcataaaggttatatacacgtttctatttatataacaatctttaaatgacagaattatagaaatgaacaacaaattagtggttgccaggatttaaggagtttgggtgggggtgggagtagagggatgcgtgggtgtagctgtaaaagagcaacaggacggacggatccttgtggtgatagacatgctctatgtctggactgtctcaatggcagtatcctgcttctgataaagtactgtagttttgtaggatgctgcactggggaaactggggaaagtttacataggatctctctgtattctttcttataactcaatgtgaatctacagtgatcccaacataaaaactgtaatttaaaaaacttagcgtactttactgtatgtagctcctttccttgtacttgataaccttaagtctttttgtcaaccagtgatacactggtctacaaatatttattttgaattcctgcttcgttctcagcattatggtggctggaactattaggaatacaattacagaagcataagatttagagtacatataaaaaagcgtgtgtgtgtgtaaagcatatgcaagtatgtctgagagagtaaacataattctcatctttcaaaattttagtgttccactgtaaattgtaaaagctatagtgtaaagtagcatttgtaatcctattcagctcttaacttgccaagaatatcctctcaggatgtgttgcttcactacagtaccaaccattgtgttgtcaaatccatgtgaattatgcaaaacaaaagaaaaacaaatggcctacctaaggtttggcagctgcaacaaggaaactatcaatttgaggtttattgtaatacattaaatttgaaagaatattcttccaagtaattctagggcttggaatgaatgaaggatcatttgaaaaatctgcaactcatttctaaaagattaggaaaaaagagaaaagaacatagttgccaacttctccttggtttgtatttatggaatatatgaaggtttagcattttagattctttcctaattctcagttaatttacctgtagaatctctttgaagaactacttttacatttctttcattttgatgagaaaattgaaaacttggggcaactaaaaagaagtgtttagcttgagtgatagttcattaatatgatttttaggggcctggcagaaacaaatagatcctagcaggtcttgtgatttagaggattattagagatttgggtgaaatagataagtatttctcctttgatagaatcagataattgtctctctgtgcaatgtccaacaccagctttctatgtaataaaaataaactatgaaaacaaacaggaggcaaaaataaagcttcatgggcttcttaaactgtttgtgaaagttgttgttctagagatcataaggtagggagttaataaatactttgttccttgacagggctaccccattgtaccactccaaaaccatgggaatggtgtcctgtgaggttgtatagtacacagtcagccttgttctgtgcagcatccctgggacctgccatgtactagacactgttctaggtactggggatatagcagtgaacaaaacagatgagaaatatccctgccttgatggaatttccattctagactggaaattgagacaatgagccaaatggataaattaattttatagcatgcttggaggtggcatattctatgccaaaaaataaagcaaaggagttggaaaacaattgctaggattggggagttgtttcagttttaaatagggtggtcagatcacttgagtgcaggagttcgagaccagcctggccaagatggcgaaaccccatctctactaaaaatacaaaaattagctgggcttggtggtgcgtgcctgtaatcctagatactctggaggctgaggcatgaaaattcctttaacttgggaggcagaggctgcagtgagctgagcttgcatcactttactccagcctgggagacagagcaagactctgtctcaatttaaaaaaaatggggtggtcaaggagtgcttctttgagaagtgaatgttgtttctttaaaatttttttttaaaatgttagattcagggggtacatgtgtgggtttgttacatgcatatagtgtttaatggtgaggtttgggcttcaagcatagccatcacccaaatagcaaacattttcaaccaagatgaaggtgtactgttcactctgggtaagagtgtgccaggcagaaggaacagttactaccaaggtactgaggtgggaatattgcccttcagcaaagaggctagagtgactggagcagagaaggggaatggtagatgttaccagtggagtcttgactaggagtcatccaggttcttggcagtttgaacaaagaattggacaaaacacacacaaagcaatgaaagaatgcagcaacggaagtacagatttattgacgtgaaagtacactccacagaatgagagtggacttgggcaagcagctcaggagcagtggttacagaattttctggggtttaaataccatctagaggtttcccattggttacttggttacatcctacataaatgaggtagtgggccatgaccagtctgattagtcgcctttcatgatcagtcagagactgaagtggttacaaagttacacccctatgcaaatgaagactaggcctgtgaccagcctgattggtggtgggaggggacaaatcagaggtactttccatttttcatctgataccggaaggggtgtgttgtaaagggagtagcctctgatacttttgttacatgggcttggaaagttggggttttccttatgatttagttctaggaagtcagtgtgaattggccttagggtccctgcctcctggcgctattctcctgcctcagtagagatgagatctgaacataagatgggacttgtgggacatccataagacttcagcttttattctgagcaagatagggtgcaatctgagggctctaagctgggaggtgacattagctgactagatagctgtgggtagtgtgaacactatattgtctggctagttgggaagtggctcaaatatcatattgaataaatcgcaataaaatgctaaagttggagctgtaactgaggaaaatggtggttagaaaagagaaatgaaaaacaaataaacccgtgacaagacttttctattacttgtaagaaagtggaagtggaggaggggggatactgtcttgtaataaaaacttagtcttatttctaaaaagtaattgttcaactagaagcaacaaaactaatcatagggaatctgttttagtaggtaatgcagtatgtcaaccatttttagagtatctcaaaattttcaacattggcaaaatacccaaagctggcattacagcttggattcttcccagtggaaaaccaagttggacacaaagttctgaagaggaaaggagtctgagaaatagaaagaactgagatgcgtgtatttcctgaaccttttttccccctgtccttaatgatgttgtggttaaaacacttttgtgggtttattgagactgataaatacgctcatttacatctcattaatgtcaaattgatgtggctgaatagcatagtttggtagtctctaatgtgtgagacttcatgacttaagtaaacttttctattactctgaattagtgtcaccaagggcataggttttttaaagaaatgcttgtagagactttaaaataatgaaaaatattcaacacacctggctaagagtgattgtattacattcctgtttctttagataaaggtctgtcagcacatccattacaggcacatcttttcaggttgaaacttggcatagcagttctaaagaggaaagagattcaaacaaaatgtgaacaaaatgtttcttttgcttgaagaagacattcccttcataccctgatgcagctacatcccataaaactttgagaatcttattttcgttttgtttttggtaaaataagaagcgcctttgaaaaacagtttatctttggacacgaaggtaaagaaaaaccttttgatgtttggcaacagatttgcttaagaacaaaaatgatttaaaggactttttgaaaagagttagtgttgtctatttttattttctcagacagaccataatcacaatgactattgaaacaccgatacccttaagggctaaatttatcccgcctgtccctggaacaaaacaagaatatccacaaacatgacaccctctttggcagaatagacactaagtgcatatttgttgagaattgagaagatgcataagtcagagaaaagaaattatatttaaaaaggctttacaaatttttagtttttgaggtaatatatacaagtggaacacaactcaaaaagagtatgtagtgaaatgtaagtttccttcttcctccttgctctaagccaccactgggttaccctccacagagacaagcactgttatcagtgtcttatgtgtcatttaagagagcatattcttttttctttttagttaattggtagctttacattttattctgcaccttgctttgttctcctgacatttcattttggaggctgttcaatatatgtatgtagagagctacttctactgcattctttttaattagcttcatgttctaattggtacgttacatgtaccaatacacatagatgtaccatgatttacttagtctatacataaacatttaaactattcctaacttttcctattacaaacagtgtaacacaacatcctcgtgcacagatcattttgtgtgagtgtatctgcaggataatttctagaagaggaatatttatgttaaaagtatatgcatgtatgtagactcttctccatagaaattgtacacgcccagcagcaatatggaagtgtgcctatttctccattccctttccatcacaatgtatatcaaaaacttagtaatgtgatggaggggaacagcactctgttttagtttgtgtttttatcatgagtaatgttgagcatctttttataagtttaagaatcatttgtattttctatgaactgtttatatattttcttgcttttagaaaatattattgatccttttcttattgatatgtgaaaactcttttttaaaataagtgttttctcaacacacactagtgcatttttggtgtatgtaagttccaattggctttttatcataccaaaaatgtttattttttcctatttttatagattaataataattgtacatacttatggagtatgtgtgatattttgatacatgcatacaatgtgtaacaatcaaattgggatatttaggatatctattacctcaaacatttatcatttctttgctttgggaacatttcaattcttttagcaattttgaaataataaattattattactatgtcaccttactatgctgtccaacactaggacttattccttctacgtttctgtatataaccaatctctcttcatccctcccactgcctcacacccttcccagtttctggtaaccatcattctactctctatctccatgagataaacttttttagctaccacatgtaagtaagagcgtgcaatattttttctttatgtgaatttattcctgggttttctattctattccattggtctatgtgcctgacttatttcacttaacataacgacctccatttccatccatgttgctgcaaatgacagtatatcattcttttttatggctgagtagtattccattgtgtatatatatgccacattttctttatccagtcttctgttgatagacacttgggatgattgcatatcttggttattgtgaatagtgctacaataaacatgaaaatgtaggtatcccttcgatatactgatttctttgttttgtatttgcttttttaaaagtaatttttatttcaatagtttttggggtgcagttggtgtttggctacatggataggctgtttagtggtgatttctgagattttggtgtacccatcacccaagtagtgttcactgtacccaatatgaagtcttttatccctcatcccctttccaaccttccctactgagtccccaaagtccagtatatcattcttatgcctttgcatcctcatagcttagctcccacttataaatgaggacatacaatactggttttccattcctgagttattttacttagaataatggcctccagctccatctaacttgctgcaaagacctgattttgttcatttttatggctgagtagtattccatggtctgtatctaccacattttctttatttacttgttgtttgatgggcactttggttggttccatatctttgcaattgcaaattgtgctgctgtaaaaatgcatatgcatgtgtctttttcctacgtgacttcttttcctcttggtagatattcagtagcgggattgctggatcaaatggtagttctactttttgttctttaaggaatctccatactgttttccacagtggttgtaccagtttacattcccaccaacagttctaaaaatgttcccttttcaccacatacacaccaacatttattgttctttgaatttttaattatggtcattcttgcaggagtaaggtggtatctcattgtggttttgatttgcatttccctgatcattagtgatgttgagcatctttgcatgtgtttggtggctgtttgtatgtcttcttttgaaaattgtctatatgtcctttgtgcactttttgatgggatttggattttttttgatggtttgtttgagttccttttagattctgtatattagtcctttgtcagatgcatagtttgtgaatattttctcccattctgtgggttgtctgtttgctctgctgattatttcttttgctgtgcagaagctttttagtttaattgggtcccatttatttatttttgtttttgttacatttgcttttgcagtcttattcatgaattctttgcctaagccaatgtctagaataagttttccaatgttatcttctagaatatttatggtttcaggtcttaggtttaagtttttgatccatttgaggtgatttttatataatgtgagaaatgaggatccagtttcattcttctacatgtgacttgccagttttctcagcaccatttgttgaatagggtgccctttcctcaatttatgtttttgtatgctttgttgcggatcagcacttacttaatatatttggctttctttctgggttctctattctgttccgtcggtctacatgcctatttttatacccctaccctgctgttttagtaactatagccttgtaggataatttgaagttgggtaatgggatgcttccagatttgttctttttgcttatcttgcgttagctgtgaggccccttttttggttccatgtgaattttaggattattttttctaattctgtgaagaatgatgatggtattttgatgggaattgcattgaatccgtatattgctttgggcagtatggtcgttttcacaatattggttccacctatccatgagcatgggatgtgtttttatttgtttgtgtcatctatgatttctttcatcagtgttttgcagttttccttgtagagatcttttacctctttggttgatatactgatttcctttcctttggataaacacccaatagtgggattgctggagtgtatagtagttatatttttagctttttgagaaacctccatgatgtgtttcatcatggctgcactaatttagattcccaccaacagtatataagcgttcccttttctttgcatccttgccagcatttgttattttatgtccttttgaaaatagccattccaactagggtgagctatcttttatttgcatttccttcatgattagtgatgcaaagcattttttcatatacatgttttccacttgtgtatcttattttaagaaatgtctcttcagaccctttgcccactttttaatgggattatttgggcttttttttttttttttagctgttgagttgtttgatttcctgttatgttctggatattagttccttgttggataaatagtccgcaaatattttctctcatactgcaggttgtctcttcactctgttgattgttttctttgttctgcagaagatgtttagtttactgtgaccccgtttgtctatttttgtttttgttgcctgtttttgaagtcttagccataaaaatctaatgtcctgaattgcttctcctatgtattcttctagtagttttatacttttgggtcttatgttttagtatttaatccgttttgagtttatttttgtatatgtagtaggggtctactctcattcttctgcatggatattcagttttcccatttgttgaagaactgaatgctttttctatgtctactgagatgattcatatggtctttgtccctcattctgttgatgtgatgtatcatatttattgttggtgttgaacaatccttgcatccctgggataaattccacttgattgtggtgtattgtctttttaatgtgttgttggatttggttagctagtattttgttgagaatttttgcatctgtgttcatcagggatattggcttttagttttctttttattttttagtgtgtccttgtcttgttttgatttcagggtaattttggcctcatagaatgaattaggaataattccctcttctccaatttttttgaatagtttgagaagaatttttgttagttcttcttcatgagtttagtagaattcagcagtaaagccatctgctcctggtcttttcttaacttgagacattttattaatgattattactaatttttattctgctcaggctttctgtttcttcctggctcattctttgtaggttttatgtgaccaggagttatccattttctctaagtttttccatttgttaaaatatagctgtttataatagtctccagtgattctttgtatttctgtggtaccagttgcaatgtctcctttttttttttgtttctgattttatttacttgaatcttttctttctttttcttggttactatagctagcagtttgtcaattttacttatattttcaaaaaccaacttttcatttcatcgatcctttgtactttttcaagtcttgatttcctttagttttgttctaatgttattacttctttccttctgttaatattaggtttgatttgttcttgcttttctagttccctgaaatacatcattaagttgtttatttgaaatctttctacttttttgaggtaagcatttattgctataaacttccctcttggcactgcttttgctgtatcgaataggttctggtatgttgtattcacatcttcatttgtttccagaaatattttaatttccttctttatttcctcattgatgcaatagtcattcaggggcatgtggtttaaccttcatatatttgtacagtttccaaagttcctcttgttactgatatatagttttagttcattgttgaaattcccaactgatatggtttggctgtgtccccacccaaatctcatcttgaattcacacgtgttgtgggagggactcagtgggaggtaattgaatcatgggggcttgtctttctcatgctattctcatgatagtgaataagtctcatgggatcttatggttttaaaaacaggagtttccctacacaagctctttgcctgctgccatccatgtaagacatgacttgctcctccttcctttccaccattattatgaggcctcccagccctgtgtaactgtaagtccattaaacctctttattttgtaaattttccagtcttgggtatatccttatcagcagcgtgaaaacagactaattacagtaaattggtaccaggagtggggtgctgctgaaaagataccccaaaatgtggaagtggctttgggactgggtaacatgcagaggttggaacagtttagagggctcagaagaagataggaaagtgtgggaaagtgtggaactccctagagacttgttgaatagccttgaccaaaatgctgataatgatatggacaatgaaatccagactgaggtggtcttggatggagatgaggaacttgttgggaactgaagcaaaggttatgttttagaaaagagactggtggcattttgcccctgcccgagagatctgtggaactttgaacttgaaagagatgatttagggtatctagtagaagaaatttctaagcagcaaaacattcaagaagtgacttcagtgctgttaaaggcattcagttttaaaagggaaacagagcataaaagtttggaaattttgcagcctgacaatgcaatagaaaagataatctcattttctgaggagaaattcaagctggctgtagaaatttacataaataatgaggatcctaatgttaatccccaaaacaatggagaaaatgactccagggcaggtcagaagtcttcatggtagcccctcccatcacaggaccagaggcctaggaggaaaaggtgttttttttggccaggcccaggtccctctgctctgtgcagcctagggacttggtaccctgcatttcagcagctccagccatggctaaaaggggccaaggtacagcttgggctgttgcttcgcagggtgaaagccccaagccttggcatcttccacatagtgttgagtctgtaggtacacagaagtcaagaactgaggtttgggaacctcttcctagatttcagaggatgtatagaaatgcctggctgcacaggcagaagtttgctacaggggtgaggctgtcatagagaacttctgccatggcagtgtggaaaaaaatgtggggttggaacccaacacagaaaccctacttcagcattgtctagtttagctgtgagaagaggaccaccatcctccagactgatagatccactgatagcttgcaccatgcacctggaaaagctgcagacactcaatgccagcccatgaaagcagccaggaggggggctataccctgcaaagccacagaggcagagctgcccaaggccatgggagcccacttcttacatcagcatgacctggatgtgagacatggagtcaaagggcaccattttggaatgccctgctggatttcggacttgcatggggcctgcagcttctttgttttggccaatgtctcccatttggaatgactgtatttacccaatgcttgtacccccattgtatctaggaagtaactaacttgcttttgattttacaggctcataggtgaaaaggacttgccttcactaagatgaaactttggactatggaattttgggtaaatgctgaaatgagttaagattttgggggactgttgggaaggcatgatttgttttgaaatatgaggacatgagatttgggaggggccagggcagaatgatatggtttggctgtgttccccacccaaatctcatgttgaattctcatgtgttgtgggggggacccagtgggaggtaattgaatcacgagagtggatttttcttgtgctattcttgtgatagtaagtctcacttactcactcgtgatagtgagtaagatctgatggttttaaaaagagaagtttccctatacaagctctctctcttggcctgctgccatccacgtaaaacgtgacttgcttctccttgccttctgccatgatggtgaggcctcccagccatgtggaactgtaaggccattaagcatctttcttttgtaagttgcctagtcttgggtatgtctttatcagcagcatgaaaatgggctaatacaccaactattgttgtactggagtctgtctctccctttatatctgataatatttgttttatatatctaggtgctctgctgttgggtgcttgtatgtttggaattgttatattctctttctgaattgatcccttcatcattatataatgactttctttgtctctttttacaggttttaacttaaagtctgttttatctgatataactatcactattcctgcttgcttttggtttcatttgcatggaatatatttttccatccctttactttcattctatatgtgtccttacagatgagatgagtttcttggagacagcataaaattgggtcatgctttttatccattcagcttgattatatcttttaagtgaagactttaatctgtttacattcaaggttattattgataaatgaggaaatattcctgtcactttgtaatatgatttttggttgttttatatatcatttgtctctttcttccttttttattttttatcattgtggtttagtggttttctttagcggtaatgtttcacttctttgtctttctcatttgtgtatcttacttttatactttcatgtgtttttatgatggtagagattatccatttgctttcagatgtaggattccgttaagtatttcctgcagggctgatctagtggtgatgaattccctgtttttgattgtctgggaaatactttatttctttcatttctgaaggacagatttgctaggtatggtattcttagatggcagggttttttcttttggcactttgaatatatcattccattctcttctggactgtaattttttgctgagaaatttactgttagtcctaatcagacttgtatatgataatccccttgtatatgacttggcactttttctgtttttagaattctctctttgtctttggcttttggcagtttgcttataatgtaatttagagaagacctttttggattatgtctatttgtgagtttttgtgcttcttgtacctggatgcctaaatctcttgcaagatttgggaagtttttaagtattattctgttaaacaggttttctatgttgttatctatctcttgcccttctggaactgccagaattagaatttttttctttttatggtgtcccatatattatctaggcttccttcattcttttaaatccattttttctatttttttcttttctcttttgtctgactgagttattaaaaaaaaaaaacctgtcttcatgttcagcagttcttttctgtgcttggtatactctattgtagaagctcttgattgtattttttatttcatttattgaattcatcagttccaggcctttggttttgttctctttggatatctgtctctggtatttatcattcagctcatgaattatttttgatttctctgtattatttatctgtgttttcttgtatctcactgtgtttctgtaatattattctctggaattcttttttaggcattttataaatttcctttactttgggatctcttactggataattattgtgtttcttttgaagtgtcatgtttctttgcttttttgtgttttttgtatccttacattgatttcagtgcatctgacataacaattgcttctgattttatgcattggctttcatggagaaagactttttcctgtagataatctatagtgttggttgggtaaagtgctttggttttgattctggttgggcacggtagtatagtctgcatgatttctttggctgtaattagcatcagtgttttctctgagttcctcagtggcttagactgcagttgttaatggatgttgtggtgaggctttgctggagatgggcatgccatgcaggctggtccttgggtaccagtggtgttggtgaggcatgcctgtcctcaagtccctgatggtggatgcaggtgttagctgtggcaggtacggttaggactgatccttagacccccacacagtatgctcgggtgcaagcaatcatggtggtgggtgggatcggcttgtctttaggccccagatgatgtacttgggtgccatcagtggtggcagtggatagggtagccctgtcttcaggcccctggatggaacatgtgggtgccagtggcagcaagagggatgggttgatttccaggttcttggattatgtgcacagataccagcagcagggaaagtgagcctgtcctcaggccccctgatagtgtggggaggtacgagcaacagcaggtggagcagattgatttaagagttagctcagtgttggccagacttggtggctcacgcctgtctcccagcactttgggaggctgaggtgggtgtatcacgaggtctggagttcgagaccagcctggtcaacatggtaaaactccatctctactaaaaaaaaaaatacaaaaattagccaggcatggtggcgcttgcctgtagtcctagctacttgggaggctgaggcaggagaatcacttgaacctgggaggcggaggttgcagtgagctgagctcgtgccactgcattccagcctggggtgatagagtgaaactccatctcaaaaacaaacaaacaacaaaaaaacaaaaaacaaaaaacagagttagctcagtgttttatgatttataaatattttcttaattttctaggcatttgtgttttgattttttgttatgaaatactttttatttctatttttattagtcaaatttatcaattttaatgggttctgagttttttgacagaattagaaaatctttattgctctgagatcttttttataaaccatctcattttttaatggtactttaagggttcttatgtttaaatctttaatctgtctcagatttattttggtgtaaggtgtgttatatatatctagcttaatttttcttcgattagttatcaaggtttttttgtttttatatcactttttgaagttcattttttccgatgggattcaaatatacttatgacattaaaattttctaactatatttgtgtctatttctgggttctctgttctgtttcattgatctatttttctgtttacaaaccagcaactcaccattttaaataatagctttacaacaggtttttatatcttgcattgctaatcccgatcatttgtgttctttttcagaatgtttcttgttattcttatttttcctgtgaacttcagaatcaaatcaatttcttttgtttcaaatagtgttaattgtgtgtgtgtgaatatgtgtgaacatattaaatttatagaataagtcaggtagaactgacatctttaacatttagagttttcttatccatcaatatccctcacttttccatttgtttaattcttgtgggtccatcagtaacattaaaagttttattcacatatttcttgttatacatttttctagttactctataattttggttgctacttttaatgcaatctattcttactttggatctcctatttgcgttgtttgtatgtatgaaaagtagtggtgtcacaatattatttttgtattcattcacttaactgaattctgtcattatttatagttttccagttgattctcttgtgctgtccaggtaaataatcatatagtttccaaataatgatattttagttttatctcttaaaattttacctgcattttactgtctagttatgttattcaggacctccaaaaaattaatggtggtcatagtagacactcttgtcttcaacttattgttaataagaatactaataatagagttttcattaagcatgacatgctggcttttgagatgcaacagagatattttgtcatattaagagaggaaacccttttttcttggtatagtacatgataaggatttttgtcaaaaataacgttgaattttatcaaaagccttttcataatttattgagatggtattttagttttctctttttattattaacatggtaaattatattaatagatttattgttatacattattcttttatttggtgcataaacaccacttagtaatggtatattatactttaatgtgatcctggattctatttgcaaatactcacttagggtcttttttcatgatattcacaagtgagtttaggctatatttttattttttttctgtgctttttattgtggatttatatgttataaatatacatttgaagattttctttttttttcctatgctctacaacactttgaatggcattaaagttaggtgtttcttaaaaatttgtcagtattccgctagtgaaaccaactatgtgttgaactattttgttgggagtaaattgacaatttgtcctccttttaaaacagatagtgatatgttagattttcaaatttatctgggatgtgatttcttagaaaagcatcttaattctcaaatttactcacactgaattgatcaaactggtgttataggagtcttttaattttttttgtttctgggatcttcctcattgtttcttgttctttgtatttgtattttctatccttataattaaaaatgttttggcgagttaaaggttttgtttcgtgttatttctcctcctccacccatgaaacatctgttgggtttacttattctttcacattccatttttcttttcttttcttttcttttctttctcttctcttctcttctcttcttttctttttttctttttctttttctttttttgagacagagtcttgctttgtcacccaggctggagtgcaatggtgcaatcttagctcatcgcaacctccgcctcatagattaaagtgattctcctgcctcagtctcctgagtagctgggattacagacgcacaccaccactcctggctaatttttgtatttttagtagagatggggtttcaccatattgaccaggctggtctcgaacttcgcctcatgatctgcctgcctcggcctcccaaagtgctgggattacaggtgtgagccactgcacctggccacatgccatttttctaattcattatttcactttttatgtttattaatttctttttttctattttcctgtttttcattttattctaacttcttgagtgcttatattatctctttcattctttcttgtttattaatatttcagctatatcacctagataattgtatattgttctttcttcgattgttatttcccagatatcctataatttcagttttgattttatatttgatgcaaaacttaacagaattttaaaatatcctgatagtagattattttcattttctgggtttgttatttttaagttttattacattatgagcacagatgtatacattgtttttcctttttgaaaactgtcaaagtttttttttgtttgcaaatgggcagttttgtgaatgttccatggaaacttggaaagaaggtgtagtctctatttttagagtaatgtatatcacttaattttatttaggttttccatattctgaaaaaaatttttttttgcttattctgtcatgtcctgagagaaaagaaagtttcctattgctgagattttattttctaatttaagacttctgttttctgtaggtttttctttattgatattgcttctgtattactgggtaattagatagtcataacatttaatctacattttgtattgtgccctttagcattacaaggtgtttatcttttttcattgaacatatactatgctgcattaaaacccatctgatattaataccatgaacgttattttctttttacttgctcttgcctgttgtaatctttgcctttccttttattttcaacccttcttggttacttattgatttgtcgtattcttgtgtgcagcagatatttggattttgctttgaggcccacctcatttttcttttaatgagtatgtttaggccatgtgtagttgtagaaataagtgtttacttttaattctgtcattatatcttatcacactttgttcacagtatggactatttctgctttgtggggcgtgtgtgtattttctgatttggaagatttgtaattttatgctaccagttactttataattatatctttatgtgactctctatttcctactattagcatagatgaacttggcaatttccattttcttccttctactcctactgcaaaattgacggtactatatttcttcatgtatgcctctttatatttcaatgtactgtaattctgttgcttgacttaccagttttaaatgatctcttttgattgctagtatatcaattagaatattttcattgataagtaactgaaaagccatctagtggttgcttaatcaattaagacaattgctaccttaataataatgttaataagtccagaagtaggatagttctagtatctcaacaatgtttttagaatccagtttttccatatttttcttgaccattctcagcatgtaggctcttaacctcattgttgtttcttcttggttacatttataggcatgaatttatcctatagcagcataagagacagagaaaaatgctgtttatcttctcaaatttcttcataagaactgagaaacaaatgtctgctcatgactcattggacagaattgaatcacatgttcatgctaaaaccagccaacgttaagagaaatagatttcccaagactagcttatgctaatcacaaatcattctgtggagctggggagaacctcctagttctacaatacagaagcagaaaaggataaatttgtgtaggtctccagtggtgtctgctacctctgtctctataaaatgaagaaatcagcagaaatatactgccaccaattttcttgcccccttgctgtgtcaagttttgttaattacacattgttacatgtcaaggcttctaacctattcattctatcctgtaaccataatgtatttgttttggtcttcgttatagagaattcagtacaactattagtcattttgccagagatttatcatgcatttcttgattgactgaagttaatgcactagcaatttcttccagaaatggaaaaagggaagaagggaaccaaattctgtggattattgcatgttaaaaaaagtttgtcagcagtcattgtacttcagcaacagttcgattggatataaaattttttcttatttccttgaggacttttctctagatgggaaaaattatgtattgaaacctgttccttccattgttttgattacactttttggggacactagttgtacatatgcttgatttccattttctctctcttcctggccttttggctaacatcaagtgtaattgatttccattttctgtatatatccttttttctataatcattaaaaaattttacttttgctataatcctttttaacttggttatttacattttattctgatcactttttaaatttgtgtccttcataattcttactttgttttcagcagcatttactctgtttggattgtctccaatatgaccttcatttctctgatggttttatttttctctcctgtttatgagctctgccagtccaatcatcatctccttgtattgccttgccttattttacttgggctcttgtatacttagtttgcatttttaatttatagaggtatgtgcttatttttttgtttatatcattatatttggtcacaatttttatctgttctgtggcaatattttttggatgccactttcctctgttccctattttctccttttgtggctcttatgcaagttattccttttaaaaaataatcatctctaactgaggcacattttttctggatcagctacctgtaaaaggtttgtgtgagaggggcaccccattgtgttctaggctaataacaattgtccttatgatttaatgagtattttttttaatttagcttttactctcttccccattgccttgccttcagacagatttctgaaaatatagcttatacatgtgatttgttattcagtctcagttacttgctttctttagtgccaagttgtgtccaggaaatctattgccaagttatgcaactactatcattattcctaacaagggattgttagtttttctgttaggatgtgatgcttactttggaagattgttttctgctgtagccatatgtagtttcttttgacatcttcttgcaactccgtttgagctgtgatacaaagtttacatgcccagtgcaggggaaatgatgtgtgtctgccacttttgagtgctatgattgttcacttctttagattctcatagtctgtcctgataattgcaggaattagaaaaggctggcctagagtcctttcctcacctatgactttagggccacattatggcttccttttcccatttcatgaaaatatgactacatctatggtcttttatgaaaaacaaagtaaaatgccctgctagcaactggcaacccaaatccaagaggtaaccagattttctttaggaatataagtttttccaaggcaatatccatgtgtgagacatctttggaagaataaatgtacagaaattggttgtattagtttcctagggctgctttaacaatttaccataaaaccagtggcttaaaagaacagatatttattctttcacagttctgaaaagctgaagttctaaatgaaggtaacagcagggatgctgttccttcagaggttctaggggaagaattcttccttgcctcttccaggttctagtggctccagatgtttcttggcttgttgctgcataactctaatctctgcctcagtctttatatggctttcttccttatgttctgtcttctcttctgtctcttataaggatacttatcattgaatttagggcccatccaggatgatctcatctcaagatctttaacttaattatatctgtaaagtccctttttttgaataaggttatactcatcaaaagtactaggggttaggacatggatgtatattttgggggaccattactcaacccactccactagtgtttctgtgtcatctctcttcatacatttaacagttatatatatagcaatgtctttgtgagtaacactgttctgggggtttcagagtattgactatcttttccttaaaatgtttataatttacttgaggactcaagatctacatttggacaataatataagttaaaacaaaaaataaagcggagtcattttggtaactggtgtgagaattccattgctgggaaatatgttcttgatatgatactttgataagcttgggtagaagttagcctccaaagcccagctagtcctcaggtttctttgatgctggtatgagaagtggcttttcggtagaggcaagcctaatggggatttccatgtaaaatgctgttctgtgcactctgacccttccttattactccaaaatatgtccaaaaccatataaataacagtgaaaataggttgagtgtatttcttttggaaatcactgaacaccctgggcattatcaaaacatacaattacatataattaaataagacaataatactattaataagtcatacagttctggaaaacagtaaggtctctctggttggagttgtctctggaaaatgaatcttgagttgaatgttaaaattgggtggaatatgattgagaaagggtattctagaaaggagaatgatattggtaagtgcaggagtgtacctaagacaagcttgagacaccaagtgagtggtctgatcctgctgaattacagtaggctttcagtagaagtgcaagattgtaccttgcttgtaggtgtgtaatagaactattgtgaataaagttgtggttcataataattattgaaccctagggcattaagcaaacataggcagtggtcaggtagttacagcaggccttgggtgagacccagtgctatgctggcttcaggtctgacccagcacagtcccagtgttggtgactgcagggttgcttgtgccacccctctcccagctccaggcagctcagcatagacagactctgtttgtttgagagaaagtaaggaaacagagcaagagtcttcctggtaatccagagaattcttccggatcttatccaagaccatgaaggcgataactctacaagtccacaggagccacagttttactaagctttaggtgtcccctaatgcagatacagctgcaatgaccaaaaacttagaccacaacacccaagtcctttcaaatatttgaaaagccttcctaagaaggacaggtacaaataagtccaggctgcaaagacaacaataaatattcaattcttcaacagccagagaccaatgaacattcacaaggatcaagaccgtccagaaaacataatctcaccaaatgaactcaataaggtgccagggaccaattctggagatacagagataggtgacctttcagaaaattcaaaatagctgtgttgaggaaactcaaagaaattcattgataaggaattcagaatcctatcagataaacttaacaaagagattgaaataattaaaaagaatcaagcagaaattctggagtccaaaaaggcaattgacactctgaagaatgcattagagtatcttaacagcaagaatagatcaagcagaagaaagaattagtgagcttgaagacaggcattttgaaaatacgcaaagtagacaaaagaagaaagaataaaaaagattgaagcatgcctacaggatctagaaaatggcctcagaagtgcaaatccaagagttattagccttagaaaggaggaagggtagggaggggggagagagggagagagagagagtagggtagaaagttcattgaaagagataataacagagaactttccaaacctagagaaagatatcaatattcaagtacaagaaggttatagaacaccaagatttaacccaaagaagactacctcaaggcatttaatagtcaatctcccaaaggtcaagtataaagaaaggatcctaaaagcaagaaaaaagaaacaaataacatacaatggatctccaatacatctggcagcagacttcagtgaaaactttacaggccaggagagagtggcatgacatattaaaagtgccaaaagaaaaaatcttttaccatggaatagtatatccagcaaaaatattctttgatcatgaaggagacataaagacttttccagaccaaaaaaaaggctgagggatttcatcaacatcagacctgtcctacaagaaatgttaaagggaattcttcaatcagaaagaaaaggatgttaatgaggaataagaaatcatctgaaggcaaaggactcagtggttatagtaagtacacagaaaaaaatggaatattataacactgtaattgtggtttgtaaattacccatatcttaagtagaaagatgaaaacatgaggtgatgaaaaataataaactgcaactcttcaagatgtaggcaatacaataagatataaatagaacaataaaaagttaagaagcagggagacgaagtaaaagtgtagagttctctttttgcttgcttgttagtttgttaatgcagtgttaagtcaccagtttaaaataatgggttataagatggtatttgcaagcctcatggtaacctcaaatcaagaaacataaacaaatacactaaaattaaaaagcaaaaaattaaaacatagcaccagataaaatgaccttcacaaaaaggaagacagaaaggaaagaagggaggaaggaagagaagaccacaaaacaaccagaaaacaaataataaaatggcaggcataagaccttacttatcagtaataacgtttaatgtaaatggacagaactctccaatcaaaggacatggagtaactgaatggtttaaaaaaaaaaaagacccaattatctgttacctgctggaaacacaataaagaaatatcagacttaatctgcacagtagatcaaatggacctaatagaaatttacagaacattttatccaatggctggataagacacattcttctcctcagcatatggctcattcataaggatagactatatgttaggccacaagacaagtcttaaaacctttgaaagaacagaaattatgtcaaatatcttctctgactacagtggaataaaactagaagtcaataacaagaggaactttggaaacaacaaacacacagaagttaaacaatgtgctcctgaatgaccagtgggtcattgaaaaaattaggaaattaaaaaaaaattgaagcaaataataatggaaacacaacataccaaaacctataggatacagtgaaagcagtactaagaggaaatttatgtgtataagcagctacataaaaaagaggaaaaacttcaaataaacaaactaatggtgtatcttaaagaactagaaaagcagttttttccaattctgtgaagaaagtcattggtagcttgatgaggatggcattgaatctgtaaattactactttacagtgcatatggaaccaaaaaagagcccgcattgccaagtcaatcctgagccaaaagaacaaagctggaggcatcacactacctgacttcaaactatactacaaggctacagtaaccaaaacagcatggtactggtaccaaaacagagatatagatcaatggaacagaacagagccctcagaaataatgccacatatctacaactatctgatctttgacaaacctgagaaaaacaagcaatggggaaaggattccctatttaatatatggtgctgggaaaactggctagccatatgtagaaagctgaaactggatcccttccttacaccttatacaaaaatcaattcaagatggattaaagacttaaacgttagacctaaaaccataaaaaccctagaagaaaacctaggcattaccattcaggacataggcatgggcaaggacttcatgtctaaaacaccaaaagcaatggcaacaaaagccaaaattgacaaatgggatctaattaaactaaagagcttctgcacagcaaaagaaactaccatcagagtgaacaggcaacctacaaaatgagagaaaattttcgcaacctactcttctgacaaagggctaacatccagaatctacaatgaactcaaacaaatttacaagaaaaaaacaaacaaccccatcaaaaagtgggcaaaggacatgaacagacacttctcaaaggaagacatttatgcagccaaaaaacacatgaaaaaatgctcatcatcactggccatcagagaaatgcaaattaaaaccacaatgagataccatttcacaccagttagaatggcgatcattaaaaagtcagggaacaacaggtgctggagaggatgtggagaaataggaacacttttacactgttgatgggactgtaaactagttcaaccattgtggaagtcagtgtggcgattcctcagggatctagaactagaaatatcatttgacccagccatcccattactgggtatatacccaaaggactataaatcatgctgctataaagacacatgcacacgtatgtttattgtggcattattcacaatagcaaagacttggaaccaacccaaatgtccaacaatgatagactggattaagaaaatgtggcacatatacatcatggaatactatgcagccataaaaaatgatgagtttatgtcctttgtagggacatggatgaaattggaaatcatcattctcagtaaactatcgcaagaacaaaaaaccaaacaccgcatattctcactcataggtgggaattgaacaatgagaacacatggacacaggaaggggaacatcacactctggggactgttgtggggtggggggagtggggagggatagcattgggagatatacctaatggtagatgacgagttagtgggtgcagtgcaccagcatggcacatgtgtacgtatgtaactaacctgcacattgtgcacatgtaccctaaaacttgaagtataataataataaattaaaaaaaaagaactagaaaagcaagagcaaactgaacccaaaattagtagaagaaaataaataataaagatcagagcagaaataaataaaattaaaattaaaaaatagtacaaaagatcaatgaagtgaaaagttggttttgtgaaaagataaacaaaatttacaaactttagtcaggctaagaaaaaaagagagactacccaaataaataaaataagagatgaaaaggagacattacaaccaataccacagaaattcaaaggatcattagaggctgtgatgagcaaatatgtgccaataaacttgaaaacctaggagaaatggatctcattctagatacaaacaaccacaagattgaactatggaggaatccaaaacttaatcagatcaataacaagtaacgagatggaagccataatggaaagtctcccagcaaaccaaagcctgggacttgatggttccatggctgaattctaacaaatgtttaaggaaaaactaataccagtgctactcaaactagtccaaaaaatagaggaggaaagaatacttccaaactggccttctatgagaccaatattaccctgatacaaaaaccaaacaatgacacattgaaagacaaaaacaaaaaattacaggccaatctccctaatgaacactgatgccaaaattcttaacaaaacattagcaaactaaattcaatgatacactaaaaagattcatcatgaccaaggggaatttatcccagggatgcaagtatcctcaacatatgcaaaccaattcatgtgatacatcatataaacagattgaaaaacaaaaaatcatatggttatttcaactgatgctgaaaatgtatttgataaaattcagcatcccttcatgataaaaactctgaaaaactggatatagaatgaacatagttcaatgtaataaaagccatatatgacagatctatagctagtatcttactgatgaggaaaatctgaaagccttttctctaagatctagaacatgacaaggatgcccaccttcactactgttattcaacagtcctagcaagagcaattagacaagagaaagaaataaagggcatccagattggaatggaagaagtcaaattatctttgtttggaaatgatgtgatcttatatttggaaaaacctgaagactccaccaaaaaagtatgagaactgttcaacaaattcagtaaggtggcaggatacaaaatcaacatataaaaatgagtagtatttctatatgccaacaacaaacaatctaaaaagaaatttaaaaagtaatcccacttacagtagctacaaataaaattaaatacctaggaattaaccaaacaagtgaaagatctctacaatgaaaatgataaaatgctgatgaaggaaattgaagaggacacaaaaaatggaaagatattccatgtccatggattggaagaatcaatactgttaaaatttccatactgtccaaagcaatctgcagaattaatgcaatccctatcatgataccaatgactttcttcacagaaatagaaaaaacaatcctaaaattaatatggaaccactaaaggcccagaatagccaaagctatcctgaacaaaaggaaaaaaatgaggaatcacattatctgacttcaaattatactactgagccatagtaaccaaaacagtatggcactggcataaaaacagttagaccaatggaacaaaatagagaacctagaaataaatctatacatctatggtgaatttatttttagcagaggaaccaagaacatatattggggaaagaacagtctcttcaataagtggtgctgggaaaactggatgtccatatgcaaaagaatgaaactagacccccatctttcatgatatacaaaaatcaaatcaaaatggattaaagacttaaatctaagacctaaaaccatgaaactactataagaaaatattgggtgaaactctctaggacattggactgggcaaatatttcttcagtaataccccacaagcacaggcaaccaccgcaaaaattgacagatggaatcacagtaagtcaaaatgcttgtgcatagcaaaggatacaacaaagtgaagagacaatccacagaatgggagaaaatatttggaaactatccatctgacaagggattaatagccataatatgtaagcagctcaaacagctctataggaaaaaatataataatattatgaaaaatgggcaaaagatgaatagatatttctcaaaagaaggcaaacaagtgttgcaaaggtgctcaacatcactgatcatcacaatatgcaaataaaaactacagtgagatatcatctcaccccagttacaatggcttttatccaaatgacaggcaataacaaatgctggcaaggatgtggagaaaagggaacccttgtacactattggtgggaatgtaaattagtacaaccactatggacaacagtttggagttttctcaaaaacctaaaaatagagctaccataagatccagcaatcccactgccagctatatacccaaaaggaaggaactcagtatattgaagagatatctatgctcccatgtttgttgcagcagtttttcacaataagcaatatttgggagcaaactaagtgtccatcaacagatgaatggataaagaaaatgtggtacatgtacacaatggagtactattcaaccacaaaaagaatgagatcctctcatttgcaacatggatggaagtggaggtcatttatgttgagtgaaacaagccaggtacagaaagacaaacatcacatatttccacttatttgtgggagttaaaaagtaagacaattgaattcatggacatagagagtgggatgaaggttaccagaggctgagaaaggtagtagggggctggtgggaagtgagaatggttaattgctacaaaaatatgtttagaaagcatgaataagacctagcatttgatcgtacaacagggtgactatagtcaataataatttaattatacatttaaaaataactaaaagagtataattggattacttgttacacaaaggataaatgcttgaggtgatagatactccacttaccctgaagtgattatacacattgtatgcctttatcaaaatattttatgtaacgcatatatatatatacctactatgtacccacaaaaattaaaactaaaatcccaaaataatataaaccacagtgtcatatttgtgcttcactgcattcaaacaaattttgaaacatatggtactgagggcccaagctgaggacaaagagacatcaagcacacctattctaaagtgaactataaataactggggtcagacacctcccccagagatcagtgagaggtggccaaactgtccttatcactctaaactgtcacccaaggcctttcctatcatttcccaattgataaaagaagatgtggggtagagaggagaaagaagatgacattgttacatttgtgagtttcttgccaaatgttgtgtttccctccctttcccgtgggggcttcctgcctacttcaaagccctgtgaaaagtggactactagacaagagcctgggagtgtcaacaggagactggcttctcactcctggctagatgttgcatgaggtgaggcagcagaggcttagcttggtgaggttgttagcatgaagtgaagtatggtgaaggaagaaaaggacctaccatgggtccttgatgtgtgggggcatgtatgtacttggaaattgatgccttctgcttgcgtggctgcactactctgccaaggctgatagacaatggaccgcaggtaagatgtctaagaagaagacagagaaaatcccccagctcacttagaaggtctggaggaggattttcatggttcctatggcttgtcagaataagtctagcaggtagaatgcaaggcatgagtttgggaactgatcaagtggcatctagttatgagataccccatttggtgagagggttgagtgcgtggaccagtgactgagacacaaaatggagatgcagttgtctcttgttttgagggcattctcagtcatgtatagtgctggcttgaagcagaacatctctccaagtaaactgcatgcaccttctgggtagatagcaccacattggtaaagaccaccagcatcagaaagaaccagacctagctagaagggaactcgaaacagctgcccacttcttccagacagccagtctcatatgtcaacctctgccacatctgaaatttctctcccactgctctaatgcgtgggtggacttacagcctggaagctggaggagggaggaggtacagaggacacagagaacatctctttccttcctgaaggatggagggagaagaactttccccctgtctgctccaggcctgacctgaagcttggctggccccagggagagcaaagaagagctttatactagctatgaaactggaatttaaaatatatttgagtcttaaatactggaattagactcttctaataactgaaagtgattggaattttgtggaatattcccagatgttactaagggatagtgaaatatgattcaatgtaggacagctgtcagcagggattgggaaaatgaaaccattttaagtttattttacatcaaatacagactgtacaataacctggttatatacaatatagtggaaagaaaatagattaagtcagactgacttgggtttgaatccttgctcagcaacttactttccacatgatttttggcaaattactttcaatagttttcttaactgtgaaatggggataggcagtaacatcattcttccaaggatttgggagaagattaaatgaaataaattctaggaagcgtctagtgtgatgcctgagacatatagacctctgaaatggggattgattattacagctggagacaaatctggtaaatcaaggactaatggctgatgtagctatcaaatgtaatttgaagtagttagatgggtgggatctgatgagtatttgatgttttctaaatcccaaactatctttttcaatgaagtcaatgcattttcaaagcatttttctgcttaatttggaagattaaatgtatctaactggaagcgcatactagaaaagcatgagaaagggcttcttgtcctgatcagaaagatgaggaggctccgaagagatctgaggtaggacttctgccagcctcaaaatgtgccacacacatttaactgggaagatgctctgaataacatactcttggccatgtgaatgcgttccttggcagccctggccctgcaaagtttggcaggaggggattttcgggttgccagctaaagccctgacactcagagcaggcctcagtgtctctgttcccaaccctgtccccatccctaactgaaggaacttttgtttgtgcaatagctgttgtatctcactcatcccttctactaattggctctgaccctaactttccatattctccagcttggagatgcctgtgggaggtttgctttgagaaggccccagctttggcattgtcagtttttcatctggctcctaatctatttcactttgtctcaagcttcccttctttggtgacccactaaaaactgaagttgtgctggcaagatggtgctttgttgtcatggaaagaggctgtttgcagaactgcggggttaacaagaaggcttctttggcctgtggacggttggtttgtctttggcagtagccagttggagtacagcagggaggcatgttcattccagaagccgtctagtcttcagttgaaggaagtgccatcttaattttgaagtgagagcaacttacatctagagcaaactctttgaaggagggggatcttccaatatcccgtgtgggcctcccgaaggcccgaggcatagacaacaaggaagcaaggaagatgaggaagaaaaggggtgggtagagaaagggagaataagagagagaaaggtgaacgaaagctacagctgctgaatcctcttctgtatccatcacatgtttttactgaaagtttaagataatatcccattgccttatgtttatttgtttattttgatagctaacacttaaatagtgcttactacctaccaggtgctgcattaacactatatatattaagtcttttaagcttcaccacaaactcatgaggtaggcgatggtactatgtttatttcaagatggtaaactgagacatggagccattaagtaacttttctaagatcacacagctagtaagtggtagagccaggtttcaaatgcaggatttatattttctcttccctttccttcctgtccctccctcccctttctccttctgtaaacaagtgtcttctttgaggtgtatttagtgtcacatattttgcatttttgtgctttttttgggggggttgtgattttgctgtttaaaatggcccccaagtgtagtgctgaagtgttgtctagtgcttctacatgcaggaagattgtgatgtgccttatagaaaaaatgtgtgtgttagataaccttcattcaggctttagttgcagttctgttggttgtgagtacaatgttaatgaatcaatagatagatattaaatatgatatttaaaagaagcatacataaaacaaggttatgtcttcataagttgatgaaagtgttatgaccagaggctcacaagaacctaactctgtatttcccaagaagccatgattcaataatctctaattcagtgtttgtgacaactttatagaacataactccatgaataatgagactttgccatattttttttggcaaagattataataaatatgtcttgccacctaagtttagcttgatgcacagtcttctaagctatgtggccatttgctaagaaataccactatatatgttttgtttcttcagttcataaaatctcatgcacaatatcttatgtggtgcctgagaaatagtcagtgctccataaatgcttattgaatgaatgattaaatgaatgaaaaaagtaacactcaaaatttacaagataatctagtctagtactttacattttaagaaatacatgaatggacctggaactaatgtgtgtgtgtgtttttctttttaagtaagccatataacctatgaggcaagcaagttgttctaattgccttctggttgattacatactatttgttgagtactagctactgggattttcaaaatggaattttgcatagtttatttccctcaatcctacctaataagattaaggtccatctgttttgtataagagtccactgtttacttatcaagagtgctttgataaacgaagaggttatcagccacttgtatgggtatcctatactctgtttggctatagtgaggttaaaaggtcaagaatctgtaaggggattcttatccatgaggatattatgtatgcctagggaccatggaagtgaagttttgtttcatttattcatctattcaacaaatattttgaagacgtgctggtgatataatttggaatacaaaaatatgatgtccctgagattgttctttggcatcttggaaaatagtcctatgtagaaagcaacatccttcatactttcagttcttaagtattcatcaagcacctattatgtcccaggcactggggatatagcagtaagacaaagcccctaccctttgaaacttatattccttcaggaagaccaagcactgaacaacccatttgaggtaatactctcccctttggcccggattctgattcagctgctctttatttattatctccatattatgtgaaattatcttgcctttttgctcatttgcttattgtctgtctcccctcatgacaaatgtagctctaaaagagcagaaacttcgtctttcctattgctgaatgtccatcactgagaatagtgtttgatccaacagtagatgcttaataaatgttcgttcttatttaattatagttatggtaatgctaggaagtgtatttctggagattttgaattagtatggacaatcaggaatactcctttaaggaaatatggattgagttgaactttgaaggagtaagcagcaactaaatggagcaaagagtatatattctaggcagagggatcaggtcaaagaatggaacattagaatgtgtgatataaaattgatatatctggagttcaagagtaggagagtatattaggtgagtctagagaggtaggagagggcaggatagtcagggattaggaggctatatagggatttggagttttatcctaagagcattgggaagttattaaagaactacaaacaggaaatcaatctgttgttctgtggatgggagagagactactgagtggatagtgcaaccattcatggtcttgaagattaggtgttcagtctgggaaatctttgattcaaagtacctgtgaaacatccatttggaggtattaagtagacaattggctatacatatttttgggttcagagaaggaggtctgaaatgaatacactcatttgagtgacaacactgtgaatggtgtttgaagtcaagaggactgatgaaattgtctagggggagagtgtagagtaacaaaaacagagggcttcattcaggctaatctttgaggaacttcctcttttaaagatgataaagaagggtgaacaggaaagaatcttaaaagcagaaaagtttaaactaaactatctatgcttatttatatggcctttctgagtggttttattgtcaattgcccaagcatatctctctaataagactctatttaatttaccatattttaatcacttattttcttgtctttttcttctattgtccttgagagtagagattttgttctttaaaatcatgcttgaaaccctagtgcctagcatgcttccagcttaataggcatgaaatatatctgttattgagtgggaatacagagctttcttaggaaagatgagcaagagcggaaagcagatttttcctcacagcctcttctatgtgggacaccataaacattttattttaagccttttgtctataactgtgaaatggtgatttaggtatcaggaagcagatgggaaactttttgaggggtagaggcatttaaattctgcatctgtggtttctttgcatggatttgctcctacccctagacctgtggctgctaaaagttatttccagaagctgttgcagccaagagtctggtgtctacttcatcactttggaggttggcctgcctaggtctcccaatagtccctttccttctattccctctctcttgactatctgtttcccatttcctctaactttatcccaattcctctttgtccaaagaatcccagggcatgtttcataattataggcattattttactcaggatttattaacattttgtacagttatcacctttccccatttttccattatgaaatacatttttttatctcatataatttttacctttgataatgaagtgtgtatattctctttgataatggatctaatgataatgtgaccagtgtgtgaagatcagtgggccttcctctcctcccagttactccacattctggctaggtgcctctgctactaatagcttagcctgctgttcccatgtttgaggattgattctttttcctaggctgaggcaaacagttgtaatgttaaaggcttgctgacagcctgtctttgttgcctggaccgtgttttaatacgtgatctttgctgcctgaattttcttttttctagactacttgatttttcttgacctgtggaattttatgattacttgatttgtgaatttatctcaagcccctggttttgaaccaatgactctattattttaagccaggtgtattgtttttttagcctgtgtctattatactgtgtgttgcttcttatattccctatatctaagtaacttggctgactgggcattttgttaactttggggaggaaaagcatcaacatgacctgcatagggctggagaagagtgcagttagcccttgagggttgggggtgaatgtgttaagggtattaagggtggggagatactgctaagttggagaaaaactttcagcgaatttcactgatttcaaatcaagctgaatttgaagttcttgtctacatgagtgaacaatttttaaaacatttgaaggcatgcatttaaagtgacagcttaatgttaaaatgggaagttatgattcataagcagtagtaaaattttgaataacatgactttattcattgacagtaactgctttacattttccggtttcattatatcagtactgtgaataaaatccagaaaagttatagaggaggaaatgactttgagtttttattcaatagtcattacttacgtctttccacatttttttgcaaattttaagtttcagtaatgatcttgctattcaaattttctatttcttacaaccataatcttctagaatagccacaaaggtaggagtaagctgaagtaaaaagcctgtaggtcagtgtaaatgcctttcataaagcccacagcttgattcagtaaaacccagattgacgtctcttttcttatgataggcccagaatttatttgatttagttatatctatgacattttatttattttctcctggcaacatatagtttccacttttgatctaggggaaaaaaaggaggcttatagctgtaaaaatagccctgtacaaagtaatagaccctaaagtataactgtgcagagacaatgaagaaacagatcactgttgcttagtaggaatttctgcaatgacagaagtttttctatgcactgcccaatacagtggtcactagccacaaggagctgatgagcactggaaatgtggctattgaacctaagatactgaaatttaattttaatttcaatttaactaacttagtcacatgtggataggagctactacactggcctagtgcaagtatctacttcaagcttgtccaacctgtggcccaggacagctttgaatgcccacacaaattcgttaactttcttaaaacattatgagattttttttttcctaactcatcagctatccttagtgttagcatattttatgtgtggcccaagacaattcttcttccagtgtggcccagggaagccgaaagttgaggcacccctgatctagatcattgtattaactttctactggtattacaaaaaaattaccatggacttactggcttaaacaacacaatttcattttaatgaatgaatgaatgaatgaatgaatgatttttttttttggcttaggacaacacagatttattattttgtagttctgggagtcagaagtccaaaatgggttttacttggcaaaaaataaagtgccagtagagctgcattccttctggaggctctaggggagaatctgtgtccttgccccttccagcttctgaatgctgtctatgtttttggcttgtggctctttcctccatatttaaaggcagcaatgaccagtcaagtattgtcatattgtgtcactctgacactcaagttagaaatctagcactgttctcactgggctaaaatcaaggtgccctcagggctgctttattttctggaggatttaggagagagtccattttcttttcctttctagcatttaatggctgcccatattccttagttcatggcccccttcctccatcttccaagccatcaatgttgcatctctctgtccccttcttctatagttccatcttcctttgcctctcttcttctgcctctcccttacacttataaggattcttgtgattacactgagcacaccttgataatccaagatagtctccttattttaaagtcagctgactagcaatcttaaatcccttttgctatagaacctaatatatccgtaggttccaagaattaagactggatatttttgtgtgggccattattctgcctaccacagcttctaaatttggagccatttaatgaaaagacaaggtaagccatatgtgtgtgtgtgtgtgtgtatatatatatatatatatatacattgtttgttgggcctatacctatatttcatccaacacagtatagggtctcaaaataatttaagaacaatagaaacttaattttaaaagaggactgatatgatatctgctccaatcttctatcccttgtagttttattctcttctataatagaatctctagtttattaattttctgtcattagtttcctgtgaaggatactccctacttaacaacaaaatcagctgcattgttgtatagctatggttgttctagatcatcctatcacctagcctttacaatcaccacagagtagcacgttggtttctgacttttggaacaatgttaacctgctttttcgcagagttacgtatctcaataaatggaattactacctacatagttgtctcggcaaaatcttgggaattcttctttatcacccaccattcaccactgttgaatattcttaatatataactcctaaaatatctttcagatctgtctacttcttttaagtattttacttttcagttttagaatttaatttttttatagtttcaatttatttgctgagattctcatttgtttatgaatcaagaccatgttttctttttctgtcattgttctttatgtatgttcattttttagtttttaaatttatctatatttaactcatttccatagcttttgaggtacaagtggttttgtttacatgaataaattgtacagtagtaaagcctacgattctagtgtacctgtccctggacattgtacccaatatgtggtttttttaatccctcacccctctcccaccctctccgcttctgagtctccaaaatccattataccaagctgtatgcctttgcatacctacagcttagctcccacttataagtgagatcatacagtatttggttttctattcctgagttactttacttggaataatggcctccagctctgtccatgttgcttcaaagtacattagttcattcctttttatggctgagttgtattccatggtgtataaataccacattttctttatccgcttatctgttgatgaacacttaggttggttttatacctttacaattttgaaccgtgctgcgataaacatatgcatgcaagtgtctttttgatataatgacttcttttcctttgggtagatacctagtagtgggattgctgggtatctactttactgcatactcatttattctgagtacacataaatgtggttgtgtattaacttgtgaatgcaaaaccatctctgcatccttgggataaaacccacttgatcatggtgaattatctttttgatgtgctgttggattcgatttgctagtactttgttgaggatttttgcattaatgttcatcaggaatattggtctgtagttttctttttttgttctgttctttcccggtttgggtatcatggtgacactggcttcatagaatgagttagggaggattccttctttctcaatcttttggaatagtttcagtagaattggtaccaatttttcttagaatgtctgatggatttcccctatgaatctctctggccctgggctttttcttttgttgttggcaatttttaaaaattactgattcgatgttactgcttgttatttgtttattcagggtttctatttcttacttattcaagctaggagggttgtatatttctaagaacttatccatttcctctagattttctagtttatgtgcatagaagtgttcatagtagtctcgaaattttttttgtatttccgtgctattggttgtaatgtctccatttttatttctaattgagcttatttgaatcttctctcttctgttttgtttatatttttaaagaaccaactttttggtttattggttttttggtttcaatttcatttagttatgttctgatctttgttatttcttttcttctgctagctttgggtttggtttgttcttgtttctctagttccttcagatgtgacattaggttattaatttgtaatctttcaggctatttgatgcaagcatttagacctataattttcctcttagcactgctcttgctgtattctgaggttttgaaaccttgtgtcactattattattcattttgaatcatttttatatttccattttgatttcattgctaccgcaaaaatcattcaggagctgattgcttaatttccatgtatttgtgtagttttgagggttccatttgaagttgatttctagttttattccattgtggtctgagaagatacttgatttgatttcagttttaaaaaacttaatgagatttgttttgtggcatgtcatatggtctatcttggagaatgttccatgtgttaatgagaagaatgtatattctgcaattcttgggtagaatattctgtaaatattattaggtcaattttttttatagtgtagattaagtccggtgtttctttgttgactttctgcctctatgatctgtctagtgctgtcagtggagcattgaagttccccactattattgtgttgctatctatctgttttcttaggtctagtggtaactgttttatgaatgtgggagcgccagagttaggtgcacatatatttaggattataatgtcttcttgtgaccttttttgccccccctttttttcttactattattgctttagtctgttttatctgacatcagaatagctactcctgcttgcatttagcttccatttgcatggattaactttttccacccctttaccttgagtttattagaacccttacatttaaggtgatctcttgaagacagcagatatttggctgtgatttttttaaaatccattctgccaatctgtatcttttaagtggagcgtttagacaatttacattcaatgttaatactgagatgtgtgtactgttcagtcatcatgttgatgttgcccagatgctttgctttctccactgtgcggttgttttataggtctgtattagtctgttctcacactgctaataaagacatacctgtgactgggtagtttataaaggaaagaggtttaattgactcacagttcagcatggctggggaggcctcaggaagcttacagtcatgggagaaggaaaagaaaacatgtccttcctcacatggtggcaacaaggagaagtgctgaggataatagggaaaaacaccttataaaaccatcagatctggtaagaactgactcactatcataagaacagcagcatgggggtaactgcccccatgattcaattacttcccactgggtccctcccatgacacatagggattatgggaactataactcgggatttgtgtggagacacagccaaaccatatcattctgcctctagcccctcccaaatctcatgtccacatatttcaaaacacaatcatgccatcctaacagtcccccaaagtcttaactcattccaacattaacccaaaagtccaagtccaaagtctcatctgacaaggcaagtcccttctgcctattagcctgtaaaattgaaagcaagttaattacttactagatacaatggggatacagacattgggtaaatacaactattccagatgggagaaattgaccaaaacaaaggggatacaacccctttcaagtctgaaatctaatagggcagtcattaaaccttaaagttacaaaatgatctcctttgactccatgtctcacatccaggtcatgctgatgcagaaggtggacatccatggtcttgggcatctccacccctgtgactttgcagggtacagcccctctcccagctgctttcacagctggtgatgagtgtctgtggttttctaggcgcatggtgtaagctgttggtgaatctagcattctggtatctggaggacagtggccctcttctcacagctccactaggcagtgctccagtggggcctctgtgtgggggctatgacaccacatttcccttccacatcaccctagcagaggttctccatgagggctccattcaagcagcaaacgtctgcctggatatccaggtgtttccatacatcctctgaaatctaggcagagcttcccaaaccccagttcttgacttctgtgcacccgcaggcccaacaccacatgtaagccaccagggctttgtgcttgcactctctgaagcaacagcctgagctgtacttagcctccttttagccatagctggagctgaagcagctgggatgcagggcatcatgtcttgaggctgcatagagcatgggggccctgtacatggcccacagaatcatttttccctcctaggcctctgggcttgtaatagtaggggctgccatgaaggtctctgacatgccctggagacatttttcccgttgtcttgatggttgacatttggccccttgttacttttgcaagtttctgcagctggcttgaatttctcccacaaatttttttttctattgcatcattaggctgtaaattttccaaacttttatgctctgcttcctcttgatcgctttgccccttaggagttttttctgccaagtacgctagatcatctctctcaagttcaaagttacacagatctctggggcaggggcaaaatgccaccagtctctttgtgtaccaagagccaccattactccagttcccaacaagttcttcatctccatctgagaccacctcagcctgcacttcattgtttatatcagcattttggtcaaagccattcaacaagtcctaaaatattccaaacttctccacatcttcctgtcttctaagccctccaaatctctaggaagttttaaacttttccacattttcctgtcttcttctgagctctcaaaactgttccaacctctgcctgttacctagttccaaagtcgcttccacattttcaggtatctttacagcagcgccccattcccgttaccaatttactgtattagtccattcttgtgctgctaataaagacatacccaagactgggtaatttataaaggaaagagatttaattgagtcacagttcagtgtggctggggaggcctcaggaaactgacagtaagcaaacacatccttcttcacatggtgccagcaagaagtgcagagtgaagtggggaaaacctccctagaaaaccatcagatcttgtgagaactcactcactatcatgagaatagaagcatgggggtaactgcccccatgattcaaatacctcccactgggttccttccacagtgcatggggattatgggaactacaactcaagatgagatttggatggggacacagccaaaccataccaaggtccttgagttttatgctttcaagaggtctattatggagcatattgacctattgtttcaagatttagaactccttttatcatttgttgtagggctggtgtggtagtgacaaactccttcagaatttggttgtttgaaaaagactatttctccttaatttatgaaacttagttttgctggatacaaaattcttggttgatagttattctttttaagaggctaaagcggacaccaactccttctggcttgtaaggtttctgctgagaagtctcctattagtctgataggttttcctttataagttttctgatactgttgtctcactgctcttagaattctttccttcatgtctacttctgaagcctgttggccatatgccttggtcatgcccttttttcagtgactctcttaggagttctttgagattcttgtatttggatacctaaatctctagcaaggccaaggaacttttccgcaattattccatcaaataagttttccaaactttttgctttctcttctccctcaggaacaccagtgattcttaggtttggccattttacataatcccatatttcctagagactttgttcatttcttttaattcttttttatttctatttttgtctgattgggttaattcaaaagccttgtcttcaagctctaaaattcttctacttggtctattctactttttaaactttcctctgcattttgtaattccccaaatgtgtctttaatttccagaagttttgattggttttcctttaaaatatctatttctttagagaatttttcattcacatcctgattttttaaataaaaaaattatgttggtttttatctttctcttatatctcctcaagtagcttaataatcaaccttttgattttttttatctggtatttcaaagattacttcttggtttggattcattgctggagagctactgtgaccttttgggggttgttatagaaccctgtttcgtatttccagaatcattttctggtttcttctcttttggatagataattttttctaattattcttgaatttatttttgattctactgtgttttcttttttttccctcttgatgatgcgactttagtatttacagtttattctagcctaatgaagctcttggtgctttcaggggtgaagactctgtatgaaattcgttgattatagatagtctttgtattatggctttctcagatgttgattgtagtagcaatgtgttcagtgtgtgagcaggttcatagtctcttgtggggttgaaatggcagaggtctcttgaagcttatcttattccccagtgatgtgcacattttaatttatttttttccccagtattttacttactgggttgaagaattcaggcttcaggccagtaggggaggtgtctgtgggtaaaaaaccagtgtggccaaagcaggtgggtaaatgcaatacccagtggtgggcagaggtcctagccttgatagaggaggctgggggagctctcagtgaaacacagtgagttctctgcaggggaaatttaggcagccacattagcttcccagccaggccagcaggaaagcaatctacctcccagtcatactcctgacccagtgttctagctattcacatcagacaggtgcctctttccatctccaagaatgttgattctctaagtagatagggattgtgactctactccttgtgcaagcctgaacctggagggcactcctcctgtgaggaaggagttactctgaaccatttcagaaaggctgtctataggtgtacccacacgaagctcccatgaaagaatccccagctgtatctgcaatggtggatgagggggagaagaagtccccttctccaagacccttcatgagtaccagggctgcccaagtattggatagagctgcagactttccctgtggagtgcagcacttcacttttgcctctgctgaaagaaacttcccacaagcagaaagttctgggactcaagacctgccatctggattcttttgtcccatggggtgctcccttgatgtggtgcagtccccctttctgcaggaataggagtccctgagggccagattactgtgaatgatgctgctcctcttagtttagccacccagtggggctgtcacactccaagctggtgctagggaatgtctgcaagggttccagtgatgtgaactgtcctcaagtctctgagcagcaggtaccagcactagctctgatgcaggtggcaggggagtgacatagactctgtgagatcctttgggtatacatagccttagtgtgttggctttctcaaatgttggctgtagtagtaatgaactggtcatgtggacagaccaggaccttctcattagctagggtgatgcaggcaatggtgaaagctgaggtcatgcacaagttttctctggcctgggcgctgtgtcattttaactgcagatggtgtaatggactgtgttggttggcttctagtaggtggtggcacttgcaaaagagtgccagctgtggtggtagcagtggattttttgttgttgttgtttccatgagcaaatatacagatttattttttatttatttttaaattttaaatttttattttaatagattttaagggaacaggtggtgttttgttacatggatatgttctttagtggtgatatctgagattttggtgcatccatcacccaagcagtatacactactacactgaatgtgtattcttatttctcatcccacttccaccctttccttggagttcccaaagtccactatatcactcttaggcctttgcatcctcatagctttgctcccacttatgagtgagaacgtacgatgtttgcttttttattcctgagttacttaacttagaataatgatctccagctaggtgcagtggctcatgcttgtaatcctagcactttgggaggctgagatgggcagatcacctgaggtcaggagtttgagaccagcctggccaacatggtgaaaccccgtctctactaaaaatacaacattagctgggtgtgttggcgtgggcctgtaatcccagctacttgggaggctgagggaaaagaattgcttgaacctgggaggcagaagttgcagtgagctgagatcacaccattgtagtccagcctgggcaaaaaagagcaaaactccgtcacacacacacacatacacacacacacacgcaagaataataatcttcaattccatccatgttgctgtgaatgtcattattccgttcctttttatggctgagcagtattccatgatataaatatatatatatatatatatatatatatatatatatatatatatatatatatacgtatatatacacacacacacacaccacattttctttatccactcattgattaatgggcgttggggctgttacatatttttgcaattgtgagttgtgctgccataaacatgtgtgtgcatgtatctttttcatataatgacttctttttctttgggtagatagccagtaatgggattgctagatcaaatggtagatctacttttagttctttaaggaatctccacactgttttccatagtggttttactagtttacattcccaccagcagtgtaaaattgctcctttttcaccacatccatgccaacatctattattggcacatagccactggtctatgtgcctatttttataccagtaccgtgctgttttggtgactatggccttatagtatagtctgaagctgggtaatttgatgcctcaagaacaatatgatttattcttttcgcttagccttgctttggctatgtaggctcttttttggtcccatataaattttaggatttttttttctagttttgtgaagaatgatgatagtatttttctttgctttatgttacccaggggaggtactcagacaatggattgggacatagagctccccaaaagttccatcatttgtgttaagctactaggacacatggaggggcaaagccaagtcgtgggcgctgggtcaggcaagtatgtgttctggctctccacgtgtgggcacaagcagtggctccagaggggattgtagggcagttctctagctgctggggtaatgttccagggaggagcacaactgcctctgttgtacagaagagtcttcatggggagtggggagtagcaggtgacagtaagccctacttagctcctatgcacttggcaaggctgttttcacacttgcagtgttccactagcagcagctagctagtttccaggcagtctgcatcaggactcaaaacttccccaggccataagctttctccatggagacagaaaccactgtgcccaggccatgcccctcccagcctgccctagaagcaggggcacactgcttctgtgcttgtggcttcagcccacttcccactcacccctcagttctggccaagggagttcatccgtacttgagattatattgtgaatcttaactgggggcttctcccaacctgttgtgtccggaattggtgggttcttggtctcactgacttcaagaatgaagccgcggaccctcacagtgagtgttacagctcttaaggtggtgtgtctggagttttttccttctgatgttcggagtttcttccttctggtgggttcgtggtctcactggctcaggagtgaagctgcagaccttcgcggtgagtgttacagctcttaaggcagcgcgtctggagttgttcgttccccccagtgggcttgtggtctcgctggcttcaggagtgaagctgcagaccttcgtggtgagtgttacagctcataaaagcagtgtggacccaaagagtgagcagtggcaagatttattgcaaagagcgaaagaacaaagcttccacagcgtggaaggggacccaagtgggttgccactgctggctcgggcagcctgcttttattctcttatctggccccacccacatcctgctgattggtagagccgagtggtctgttttgacagggcgctgattggtgcgtttacaatccctgagctagacacaaaggttctccatgtccccactagattaactagatacagagtgtcaatacaaaggttctccaaggccccaccagagtagctagatacagagtgtcaattggtgcattcacaaaccctgagctagacacgggtgctgattggtgtgtttacaaaccttgagctagatacagagtgccgattgctgtatttacaatccctgagctagacataaaggttctccatgtccccaccagactcagaagcccagctggcttcacccagtagatcccgcaccggggctgcaggtggagctgcctgccagtcctgtgctgtgcgctcgcactcctcagcccttgggtggtcgataggactgggtgccgtggagcaaggggtggcactcattggggaggctcaggccacacaggagcccatggagggggtgggaggctcaggcatggcgggctgcaggtcccgagccctgccccgcaggaaggcagctaaggcttggtgagaaatcgagcgcagcgctggtgggctggcacttttgggggaccaagtacaccctccgcagccactggcctgggtgctaagttcctcattgcccagggctggcagggctggccggctgctccaagtgcgggcccgccaagcccacgcccacccggaactccagctgttccgcaagcaccgcacgcagtcccggttgccactcgcgcctctccctccacacctccctgcaagctgagggagtgggctctggccttggccagcccagaaaggggctcccacagtgcagcggtgggctgaagggctcctcaagtgccgccaaagtgggagcccaggcagaggaggcactgagagcgagtgagggctgtgaagactgccaacatgctgtcacctctcactgtgaccactgcctgtgtcagctggcagacttctgtgaggtccctcccctgtgaggtaggatcaggaatggcttccctctatctctcctggagactgggaatgcacacaaagcatgtctcaatgttactctttctcatatactccctactgctccctataacagctccagtgctgtatagggttaaggccttcccctgtgcttgggttgccaggttccccagtaggagtgtatatcctggaggtagtttatccctctctcacattcaggggacttacggttttctgcctggctcatggtgtaggctgaagcctgccacttcattcaaagggtctgtggtttcttttagttttcctgttaagttcctgtattgcttcttggagaaaagttcacagtgtgaatctctgtgcactattttgtctttccaaatggaagaagcatgccaccaataactccaatctgccatcttggaaaaaaatgtacatatatcaagacgatattttcatttcattctttgaacatattttctcttaattccttgaacatatttaaaatagctgtctgaaagtcttctgtaaatccaacacttgcggcatcttgggattggtttctattgattacttttttaaaaaaaactgtggatcacgtgttccttttttctttgtggatctagtcatttttttattgtatgagggacattgtagacaatatattgcagacactcaaatctgttatttttctctgaagagtttcatgtgtgtgtgttttgtttgtttagaaggcagtagaattattggctgatcacattgaacttagataggcatggttttatgctttgctggaatggttctgtggaaagctctaggtgctgcctaagcccctataaattactaggacttaacttacaaattacttcctctgaagatcttgtcaagacttagttctaggcttttcttggactagtttagtctgtattcatagggcagtgtttctctatcttttttttcattactataaaagagatttttaagacatttttttcccagttttgctcccccctcctccatgaagttttaataccacagatataactctatatctgtttatgtactgtggttctttgaagaggtacaaagcattgtaatatctaagattctttttgctccccgcctccctgccaagaactaattttcatccgttggggatgatattccccttgttgcgaatgcattttctatggtgtggtcctaaggtaaagcctttctgatatctctgctggatgctccaaagattaataaggtgttcatgggttttttttttttcttccctggctgtgccagaatgccagtatcttccaacaatgctcaaaatctcatacatcttttatgtttttaatcctatagcagccactctataagctttgggtagtgctgtcctgcccacgtacagcccatctctcagcaatgtacttgcagggggctcctacacggactttgaggaccccatgttgcatggtttcttcctctctggtgccctgccctgcatgttttaacttttagcactttgaattctgccttcttatctcagtaagactgctgtcctctgcttggactctagctcactttactgtggttgggagttgtcctggcacaaagagatgggaaattgggattactttgtgagtttttattctctcagagattgcagtcttacactgcccccttcccaatgcctgaaaatagttgcctgttttgcccagttttatggttctgtggtcatttatggagggacagtacacctataccaataactacagtttctctgacttcttttggaagcagaagtcctccttctactactttcaattctcatctgcacctagtacaggtgataagcattctatcagaattaggacaataattttctaacaggtcttctgatctccttactttcagcctccatactacctccagagtgaactttttgaaacacaaaaacacaaatctcctgtcattctcctgtttggaacccttattaggcactcctttatccttaggataaagttcagtcctttaaagtagctcacaggtccccctctatgatctttcttccagctctctctccagccttggctttcactctcgaccttgaacctttgtgcatgtcatactacttttttcagtttgtcatatgtgcagtggttttacttgcctccttgcctttgcacatttatttttctttttccggaattcctactctgtctccccactttacttggctaactcttgctaatcctttaggttgcagcacagatttaacttcttctggtagtcctataccaggatagaggccctgttttatgtttcatacactaccctggtgtcattattaacagttctttttttcttttccttacttccacaagaaataagctctataaaggcagggattttatttgtcttgtccagtgctatatccatagtgcttagtacaatgcatggttcacaagtaggtattccattaatatttatttattgaatgaataaatagagatagtgtttattccctttttcatatgattgctctttaaatatataggataactcttgtgggttccttatgtctttactttttgaggctacatattcagagatcataaaggaaaggtttaaatatctatagcaggagttggcaaactatggccctgggaccagatctggcctgctctctgcttttgtaaataaggttttattgaaatataaccataccagttttttttttcacatattatctatctatggctgcttttgaactaccatggcagaattgcgtagttaggatagagacatatgacctaaaatatttactttctagtcctttacagagaaagtttgctgaccactggtctacatgaagtttcctatgcatcctcaatttatttaaatgaagaagcataggaaagtatgctagagtatatgttgtaagtgatatactaggctagtctgaggtcagcaactaaccttaaaatcttagtggcttaacacaacacagatttatttctctctcatgcaaatttctttgatgcttggacaattttccagtgtactcctctccgtatagtgacttagagatccaggcagcttccattttgtgttccatcaaatcatctattttcttgatttccctggcgcaggaagaggaagctagagggcctgcaattcttgggactgaaagtgacacatagagcttcttctcatagctcattggccagaagtagtcatatggccctgcttagtgaaagttggttggaaagtaaggaaagacatataaatatttaatgagcgatgagcatctctgccatagaaagattgccttaaaatgattaaatgcttgttttttggggaaagttttcaacttaacattttcagcttcagttatcttgaacatgcaatccttccaagtaacacattataattatgtttttattttacagataccataccccgaatagtaaaatattatcaaaagtaaataggacaaggatttttttcttaaaaaattgggtctactggtttttaaaaattggattttatttaaaaaaattcactgacataattttctaagaatatatcaattaagcaaattaaataaaatacagtaatggttgaaatggcctgaaggatctccctgacacaaggggatccttttataaacacttacatggagactgaaaatttatcctgctaatggagtattgttatttagagtggtggtttttcactactccctccacccctttggtttgttttatgtgatagaaccctcttaggagagagcccaatttataaaacatacaaaaaggagctattgtgtctgaagaaggcttgcgttggattctgtctactcaatctctcttttattacccccatctctccctccctaaatgagtacctttttagtatccttgaggactgaaaaacactgctttaagcatctataggacataatttcgagctgtagaaccacagattttagaactcaaagggaatttagagaccatgtactctaattttactatgatttagtagatgttggttagcaactgtggagctgcaggacaacaaccaacttgtgtgcctgattttctaaaaaactaggggcatctcaaacaaaactaactctaaagtgattatttattcccaagagacctcttatattaggggaagactaccaatttacatcaaactagattccgaagggcattttcaggatctgtacttttcattttaatataatataatttttaatatataagtacccaagaacctaccctaaacaaaatctgggatcttgacagtaatctgtctttatacctcaccaacctatctctctgcctacccctatttgaactaatcatcattctggaccctatgtttctatttgcttgcttttctttttatatagttttattgcatctgtatgcattctctctctctctctccctgcccccttgctgtttttaactaaaaaataggggattgtgttgtttataatcttttgaagtacatttttaaaattcagtattatactgctcagaatcatccatattgttgcatattatagtcattcataccttttgactgctctgtaatattcaatgtgtgaatataacagcttgctatggcttgaatatttgttctttccaaaactcatattgaaatttaatccccaatgtggtggtatttagaggtggggcctttaggaggtgatttgcagtagtatttctgtgcataacattcaagctgagagccaagtcaagaatgcagtcccatttagagtagacacacacacacacacacacacacacacacacacacccctaggaatacatctaacaaaggaggtgaaagatctctataaggagaaccacaaaacactgctgaaagaaatcatagataacataagcatatgaaaaagcattccatgctcatgaattggaagaatcaatatctttaaaatgtccacactggccccaagaaacttatggattcaacattattcctatcaaactaccagtgtcatttctcacagaattagataaaaacaattctaaaattcatatggaaccagaaaggagcctgaataaacaaagcaatcttaagtaaaaagaatgaagctagaggcatcacattatccaacttgtttatactataaggtagtggtacaaaaacagacacatacaccaatgaaacagaatagagatcccagaaataaagctgcacaactacaaccatctgatctttgagaaagtcaacagaaataaacaacggggaaagaacttcctattcgataagtggtgctgagataactggttagccatatgcagagaatgaaactggatccctgcctttcaccacatacaaaaattaaccaaaaatggattaaagacttaaatataaggcctcaaactgtaaaagtcttagaagaaaacctaggatgtaccattctggacattggctttggcaaataatttttggctaagtcctcaaaaacaattgcaacaaaaacaaaaattgacaagtggtacctagttaaactaaagagcttctgcatagccaaagaaactatcaacagattaaatagacaacctacagaaagggagaaagtattcataaactatgtatccaacaaaagtctaatatccagactctataaggaacttaagcaattcaacaaaccaaaaactaataacctcattaaaacgtgggcaaaggacgtgaacagacacttatcaaaagaagacagacaagtagccaataaacatatgaaagaaatgctcaacatcattaatcatcagagaaatgcaaatcaaaagcacgatgaaataccatctcacactagtcagaattgccattattaaaagacaaaaaataacagatgctggtgaggctgaggagaaaagggaatgcttatatgctggtggtggaaatgtaaattggttcagccactgtggaaagcagtttggaaatttcccaagaaacttaaaacagaactgccattcaacccagcaatcccattatttggtatatacccaaaagaaaataaatcattttaccaaaaaagacacatgcactcatatgtttaccatagcactattcacaatagcaaagacatggaatcaacctaggtgcccatcattggtggattgtataaagaaaatgtggtacataaacatcatggaatactacacagccataaaaaataaataatgaaattgtgttatttggagcaacatggatgcagctggaggccattatcctaagtgaattgacacaggaacagaaaaccaaataccacatgttctcacttataagtaggaactaaccatttggtacacatggacataaagatgggaaaaatagacactggggactagtaaagtgggtagagaggcagggggtcaaggggtgaaaaattacctgttgggtactctgctcactacctggataatgggatcattcgtaccccaaacccatgtaacaaacccacacatatgccctctgaatctaaaataaaagaagaaattatagaaaaagaagtgattgggtcatgagggttctgtgctcattatggattaattcattcatgaattaatggattaatggtataacagattgattgcttatcatgcatattagtctattcttgcattgctataaagaaataactgaaactgggtaatttataaagaaaagaggtttaatttgctcatggttctgaaggctctacaggaggcatgatgctaatatctgcttggcttctgaggaggcctcaggaaacatacaatcatagtggaaggcaaacagcgagcaggcatcttacatggcaggaacaggagcaagagggcgaggggtaggtgctacacactcttaaatgacccatgagaactcactcactatcttaaggacagtgccaagagggatagtgctaaaccattcacgagaaatccacctccataatccaatcacctcccaccaggccccacctccaacaatagcgattacaactgaacatgagattgggtgtggacatagatccaaaccacatcatcatgggagtgggactggtggctttttgagaagagaaagggagacctgagcaaacacttttgacctccttaccaagtgatgccctttgctgccttgggactatgcagagagtccacaccagatgtgacctcttgactttggacttctcagcctccagaactataagaaatacatttattttctttataaattacccagtttcaggttttctgttataagcatcagcaaatggactagtacatagtttattcatcctcttttctgttgatgggaaattgggttatttctaggttattgctgttgagtacagtgatggctatgaacattcttgtgcatatctctttttgtacatgtgcaagaggttcttttgggtatacacttagtgactaaattactgggtcatagagtatgtgagttttccactttagggagtaataccaaatcattttctagccctttagccaatatataatggaagcaacagcattttttttcttttcttatgaaagagcaagcagctatttagtcctgtccctacagttcccatttcgttttcactgggacctgcattaaaacacatctgagggtgtctcactttgaaaacaggtgtgttcaatcatctactttcaccttaggtcatcctcagtctagttagcagtccttgctcctgacataaggtataaaaacactctcaggaccacttcaggttttatctcatctcactgctatgttctgtggcagtaccaccttgattttcctagctgctttagtccttatggttcttttacatctcacctagctttctggctttaaaatccctagcttgcacctacatgttgaggaaagataactcttaggcctccctgacttccagattccggattttttttctcacctttgacagctgagagctccttaaacgatgggtgacacattcaaatgcttatataggccagggtgggagcactaatgagtgactcaggattccaggattaatataacactatcaggagcagtgggactgtggtggcctgatgatgggggtagcttctccttatggggttgctcccaggacttctgatttttccagagaaaaatagttatctagatttttaactgaaatctcttgacctttgagtgtcaacaatagatttaatatttagaaacactatgcaggccaaatgaaatatttctgacctggattcaacccataggtcgcccgttggtgaactttgcctcaaactttggcttatctgccttttgctttggccattgcctcacctgcctgttcctgccaaggtgtgcccctctctctggaggagacctcattgtgacatctctcaggtttaccttgacttccaagtgacctgatactgacagcaggcagggcaatgtctgattacttaccctttcctttctctcactgcttgccttaaatgcttctatcaaattctggttcttggaggcctgacttgttttgataatttttagaagagaaatgttatatggaatgatatttttttaacttgaaaaaagtatgacaagaggccaggattttattatttaatggctctcaaacttatttgcagttttagggcttctctgcttgatcttgctctggtgttgatcaggtggccctgacttcactggatgctggatttgtccctactcttgtcctaatggattggtgaactaaaacagcagttttttgatttaggaaaataaggtctttgactttcccccgtcttagaaacggtcacaatattttgatttgagattctaggcttttgagcatttgagaatatccttctcaaaacagaaaacctttgctttctttgcaattatttggcacattctaagggtggatatggtcagtatccagttgggaaataaagaaagtgcttcataaatcacacaactttttctgttgctgagtcagtatcagacacagatattttctgagtcaagcctgctgttctgtcaggtgggagattatgggtaaggtctgagattgagtggagttcgttagagcaagatgctaatgagcacagggtcatgggtttgatccccatacaagtcgattagcttaaaccataaagggactcctggctcatccatcctggcaaatatgtggtcacaggcctaaggaagactaggttagagagtgagaaaaatccttcatcatcaagaggaaaaaaaacaaacaaacctcaaagcccatgtcctattggatgtagtaagtgatatcatctgtggttgtagtcagtgcctatattacttatatgtagggagaagatttgcatcccattaaatctcccaaaatatgtaatatagcatgcatgaggttaaataaccaatgggaactatagtgacatccaaaaactctcgcaagagaagtcttatagctaactgagatggggtggaacctccatggccatggtggaactctgtgactgtgctgaagacctcttgtgcaattaattccttgttgggcatgaagccatgcacatataccctaagacaatgctgtcttctcctggaggatggataaaagggcagagaggattgtgtgagggcctaggattgtagccacttgtcctatggctgtcttattcactctgtatatttgcacaccctggtttcacattatctgagtgttttcctatggaaagaggttttcctatcttcattataagaaggacagtattttctagccatacccatttttcaaggatgatctatttaaaaattatttttcccaatgaaaaatttcaaatgaagtaatcagaatagaataatgaatgtccatatacacatcatctggatttaacaattgtcaacattttgccatatttgcttcattattttgtgtttttttgctagtgttatctcacctttacatatttttcttaaaaatgacaattttctgcataactgtaatactattatcactcccattaaaattaactatataatttcttaatgtcctgtagtactgcaaattcaaattgctcaattgtccccaaattgtcttttgcagccagtttgttcagtcaggatctaatcaaggatagtgaatttcttatgtgtgtgtgtttgtgtgtgtgtgtatgggcatgtgacatggagctgtggaagagacaagccagttggtctgtacaatgtctcatcttttggatttgtctgagttttcaggatgagttttgaagatttgtatttagtgttgaaaatgggcttgggtctggagattggcagtggccaggacaccctgtacagggaggaccttcgaaaatgagggaggtaaacacaaaggcagtaggaatgttccatatttttgtgtcttgcttcccagcagggctgacagacacaaactcatgtgaacacacagggacatagacctttataaaagaactgggtaatgtttttctctttgccaggccatagatagcacagaacttgaggatatgataatcctattggctgtatattttgaatagtgtatcctgaataaacaagataaaaccaagaggcagaaaaatgaatagaaattaaagctatgagaaagtcatagaaaattcttagtggtctgacattttgagtttgttcttctttggttaagttcactcatctctcttgggagtagagagaacccatatttgggataaacaactgcagaggaccaagagtcttgggagaagctgatgacaggcattcagaggtaagacttgggaagaaaatagccacagaaggaaagtacagggaggcaaacagtgggaggggccagctcatctcttttctccttccccccaaagactgctggttgtcagtgggcctataaaatcttttatgatcttaaaggtattttggaagactaagtcaatctttagcattcttaacctggagcaggggttctgaaacttgaactggcacattggcatcacctgggaactctaaaacacactgatgtctgggtaccaccctcagaaattctgatagaatttgtctcaggtgtggccagggcaacgggctttttaaaagactttccaagtaattctaatgagtatctaagtttgaggaccactgatctagatcaattaaccatacatacatatatatatatatatatatatatatgcatttttttttaaaaagatacatttaacacctccccccacccaataaaccttatggaaacccaatgcataaaaaagattaaagtggaggtgctttacataaggtgctcttgaaacctggctgagtaggcaccatttgctacacccactccccgtttctttcaaaccctctcatcttcctacagcagtgtcttcaaagaattagggtctgaagagtaggactatttgaaaaataactggtccagagtttaaagggttttaaccatctacatctagaactctggctctttcaattaacttattaactgtatgactttggacaactataaactctctgaacctcagttctcttatatcttaattagagatgatacctatctcacaggttgtaatgaagactaaagttggatatatgctagtgtactgtcagtagagattagttccttcagtagttcaggctttcctccaggctactgcaagctttcaggtctgtcctgggatgggactgatggtttggtttaatctgggaacttcagttaccttcatattatactcatatggtagggtgtacacagattccctttactcatgaggggtctaaaattcctgattgacttgcagcatcataggaataaatggaggtgggatgggggtggagtttgttcactgctgaatgctaagggagaagccaggagcttccatgaaatgactcaggaaatgctctataattcagataaactgttaatcaatggggagggaaccaggcaaagtccattttaaaatgaaaaaggtattaagatccataataggcatagtggaagggctgggggtgttgaggtgggaaggagttctctatggaccagaggagcaggttcatgactgagggaggagttattgattttttttgtaaacaatagatttttaagcaggaatgaagaaacatgaacatattcttccctatttttttgttccaatatggttaaacaaaactcccagataatatagaaaccttgcttattccccttatgaatattttaccagtattgctaagaagtgaaattgattgatattaatttaacttcctcctcttcccacccagacattagtaaatagtgaaatggttgtaagtgttcagggagatgacaaaagagaagtctgaggcttgaggaattacgaagtcagatgatctgtaattgaataatattgagtagaatacacaaatcaaaagtggtgtaaaatctattacaggaaaaactcatttgagtctggccctgtcacagtcattgaactagtgattcaagtctgaacatggccagcagtggtatttcctgtttatctttcacaaagctggcaacaatttccacattatgttctctgcacatctccaacctctacggaatgaaaaatgcattttagtttcctcagcattcacaatgtagaaccttccagagaagctttcttttctttctggcatctggataaatggaggaatagcacgaagcggtaggtgcttaggccaattaagatgtttggtgggctcagtggggatgacccttagtctttaaaacatttttttgtaattatcttattcacatattattatccaaaataccatgactgtggttttggttgctactgcactttaatatagtagatgtatttttactttctatttttctttttttttctttaaagatttccattcttaatagatgagaaaaaaaattcctaagaagtaaaatgttaaagatgcttatttgggatcataggatctcttttagcaatttgcaatctgaagcggagaccacacaatttctggccacattgggatactgtctatactgctgcctctttctcacattatcttcctgctatctgacatacctatgctcacatccaggtactgaacaggggccctacatggctctgaggtaatcagagttcacttgtccacaacttgccattgaaaggctatgccctttagaatttcgtattctgaagaaaatttctattttttttaaatgtttcaatgttagtgagttgcctgaggaaagaatgtgataaaggtagttctaatcaaggtatatgtgagagactaattaatggtaggactcaatgttttatcctgatatgagtatactcatttcaaaaggagtctcctgtaaactccagctaaacaaacacaaaggcattttcaggatttcaggtatacatttgatggctggggcagagtggtgtatagagtttttcatgtagaccctcctcaaatctcaacacatgacttctatttcaaatctattttaaagaccagaactatttaaattttaccctaacatgactaaatttactttcctttatacctccacattgccaggacatttaaaagcctcttccaatcctaccaaagataagacactgatgacatctcatctcctgcctaacttgtgactattctcagtattggtgaagaggtgaaatttgtagatgagggattttaatccttcactttgtatttgatacatgactttatgtattatggtgctgatttttcagcacatctttattttcccttttccagttttaacaatgaacttttccaatctatcgttacttagtgaagacggttaatagtgaatacatggttcaggtatttcttttaacagccctgcaaatagaaatacagtgtaagtcccatatatgattatatattttcctataatcacattaagaaaagaaacaggtaaagtaaaattttaataatacatttaatccaatatgtcagaaacattatcattttaacatgtaatcgtgtaaataatgaggtatctcatttttttcctgaaaaaaaatctttgaaatctgggatttctttgaaatctaggaggtattttacaattacagcctatctcaatttgcaggccatattgaagtgctcaatagctgagtgtggctaccatattcacagccttagaaaattttgagtaagatgaatataagctgtgaacccgtacttagtttcagttagactatcttctttatgaaaatgtttaaatctaaactaatttttctccccacatatgcttctctgctagtgttctccaattcagtagttggccctgacatgcctgtcatatgtggttttaaaggcagaacatggtagacctctaagaggcattaattacagtgcgcacagctgtatgtagcagtatgggctcaataacactacttagttgtccatgccagaaaaagagttatttgagacacatcatcttcctcatttctacactccatcttccaaaattgtctttcactaagtcctttcagttccacctccagagtacatctgggaccggatcacattactccatctctacaatcttctctttaagtaggctgctacctcctagatggctgcaatagcctctaacaggcttcccacatcctctttggatattctccagtccattctccatgttgcaacctgttttgtgaaaggcaaatctgagcatgccacactcccacttaaaatcctctgacaggctgggcgcggtgggtcacgcctgtaatcccagcactttgggaggcccaggcggacggatcacaaggtcaggagatcgagaccatcctggctaaaacggtgaaactccatctctactaaaaatacaaaaaattagctgggcgtggtggcaggcgcatggagtcccagctactcgggaggctgaggcaggggaatggcatgaagctgggaggcggaggttgcagtgagccgagatcgccccactgcactccagcctggatgacagagcgagactccatctcaaaaataaaataaaataaaataaaataaataaaataaaataaaataaaataaaaaaataaaatatcctctgacaacttcccaggcttttatacttgagtccaaaatcctatggtgacctacaaggtctttgtgatctggctctatttatctactactccttccttctttattttgctatgctactcgctcttcctgtgtgaggattttcacatactctcttacttttatctgcagtgcttgtttgcatgctctctctctttctctctctttctgtttctctctctctgcctggctaacctctttttgctgttctgcttaaatgtgactttttcaggaacaccttctctaacttccttgacttttgggccccatcctgtatgtttttatatcaaacaggaccactatgtttttttcaggacacttatcacaattttatctatatgattatttgtgtaattttagtatattatctgtctccactgatgtaagcttcatacaaatagagaaccaaatctcccttgtttattccttttatgtctgtagtactagcctagggcctggcatatattaagccttcaataacttccagctgaatctgcgaatgcatgtgctcagcccattgtctgtagcagcttggtagttttaagaggcttctcaagcttgcagaaacccttgtgggtatgactaagtgttccagcttctgtttcattgtgaagattttagaagtgtagcctttaagaggcatactacaatccttccaaaaacaaagaaagtctgaaaataaatttgggagaggatgtggaacaaagtaatttctacactaataggaaaaatgcaaattggtgtaacttctttggactgtgtccccaaacaaaagctgggtcatgtcaactggctgttattctgtcttcttggttattgggtgtttctttgtgggggtattccttctagtgggtcataacatatgccataaaaatccacattgtggccacttccatagacccatctgcagacaggcctttactcagatcttcttgtcccagatctttcaatctttcttctttcaggtgcctgcccaattagccagggtattcttcactgtttattaatccttatatcttctaacagcaagtcacttcttgtccacacaaagaggatgatttagtatactgccttcgtccattgggaagattttcccctcttcgctgtctttcgaggccatccctaagggagggttgttatgcaacagcagtccatttttgggtcacaccgagatactgagctgattcatttatgagctagttttccctctttcagctggccattagggactcaacacagggctacaggtatcgtttgaagagaaatggatgatatgggtttgacagtcatgcaatttgcttgtgccccctggccctgcctttgtccaatcctggaagtatcatttccatcttatgatggagtactaccagacctgcctaatcatatgaattattgcatttgttagaactcagcttaatgtggttatttcttattgtagggtaacttgaggttctatggtcagatgctcagtctctactagggctcagtagtattccaagagctgctgtttgaatgttatatagttcctggctgaagatggcatgctttgttttagaatcctggggaactgcttatgttatgattctactatttctttctataaaatccacatggtgtcttttcaaaccacagaaaccccaagaaccaaaagttttgccgtatcatattgcataagtcatagggtcacttttatgacaacctgaacctgctggagagccctttggtgttttgagctccactcacagctggtaaatgtgtattgttgcctaacctatgtaaatgggtactgcttctgatcttcttactgatagggatggaaaagaatgcatttgccagataaatggctgcatactacatgtcatatattgtgttaatctgctgtaatgaagctatcatatctggcccagcaattgcaactgtggctactacttggttattatagaatgttgtagattttatttctttaataattaatggacattagagattttctaaatctttaatttctaaattagagattttctgaatctctctgagcccatattggtagttcatactttcctaggaatatgtctatttcacctaaggaatttagtaaatttctcttattacctttttaatatctgctacatctgtagttgtgtccctttttgattcataatattatttgtgccctctttctgtatttctcattcacttttgccagaggtatgccaattttattagtttttgcaaagaaccaatatttggctctgttgtttccttctagtctatctttgctttctgttttattaatttcttcctcttgtctttatcttctcaatttttatattattcctatttgctcttttcttaacttttctaagttgaaggttgtattagtcagggttctcttagagggacagaactaataagatacacacacacacacacacacacacaaaaaaaaactaataggatatatatatgtatatatacacatacaaaactaataggatatatatatatatatatacacacactcacacagaactaataggagatatatatatatatgagtttattaagtattaacttacatgattacaaggtcccacaataggctgtctgcaaggggaggagaaaggagaccctgtccaagtcccaaaactgaagaacttgtagtccattgtttgagggcaggaagcatccagctcgagaaaaagatgtaggctgggagactaggcatgtctcacctttttcacgtttttctgcctgctttatatttgctggaagctcattagatagtgcccaccagattaagggtggatctgccttccccagcccactgactcaaatgttaatcacttttggcaacacccacacagacacactcaggattaatactttgtatccctcagtccaatcaagttgacactcattattaaccatcacagaggtttagcacattaatttttcaccctttcttgtttcttattataagtatttaaggctataaatcttcttttactttggatttaaaaattatgtatatttaagttgtaaatggctctaaatctgtctctatctgcatctcacaattcttgatttgtagttcttttgttatctttcagttgtatgtattttctattttttagtattttctaatttttattcttctatagcccatgagtaatttagaagtatgtttttgaattttctaatgtgtaattttgtttgatagttcgttttgctgctgattgttaatttaacttttttgtcagatattgcaatgtatgagatatagattctctgaaatttgtcaatatctattttatggcctgaaatgtggttaatttttataaaccgtgtgtgcttgaaaagaatgtgtattctcaagttgttggatgcattgtttcatagacacacattaaattaaccttgtgctgttcaaatttttatatcattattgatttgttgctgtttgacatatcagttagtgaggaggtatgttaaaatcttccatttatgtggatttgtccatttctctgtagtccagatattttttgccttatactttgaaatgtgttattaagtgcatatatatgtaaattgtttttttttccaggtagttattcatttttattttttatttttttattttttatttatttatttttattatactttaagttttagggtacatgtgcacaatgtgcaggttagttacatatgtatacatgtgccatgctggtgcactgcacccacaaacttgtcatctagcattaggtatatctcccaatgctatccctccccactccccccaacccacaacagtccccagagtgtgatgttccccttcctgtgtccatgtgttcttattgttcaattcccacctatgagtgagaatatgcagtgtttggttttttgttcttgtgatagtttactgagaatgatgatttccaatttcatccgtgtccctacaaaggacatgaactcaccattttttatggctgcatagtattccatggtgtatatgtgccacattttcttaatccagtctatcattgttggacatttgggttggttccaagtctttgctattgtgaataatgccgcaataaacataggtgtgcatgtgtctttatagcagcatgatttatagtcctttgggtatatacccagtaatgggatggctgggtcaaatggtatttctagttctagatccctgaggaatcgccacactgacttccacaatggttgaactagtctacagtcccaccaacagtgtaaaagtgttcctatttctccacatcctctccagcacctgttgtttcctgactttttaatgattgccattctaactggtgtgagatggtatctcattgtggttttgatttgcatttctctgatggccagtgatggtgagcattttttcatgtgttttttggctgcataaatgtcttcctttgagaagtgtctgttcatgtcctttgcccactttttgatggggttgtttgtttttttcttgtaaatttgtttgagttcattgtagattctggatattagccctttgtcagatgagtaggttgtgaaaattttctcccattttgtaggttgcctgttcactctgatggtagtttcttttgctgtgcagaagctctttagtttaattagatcccatttgtcaattttggcttttgttgccattgcttttggtgttttagacatgaagtccttgcccatgcctatgtcctgaatggtaatgcctaggttttcttctagggtttttatggttttaggtctaacgtttaagtctttaatccatcttgaattgatttttgtataaggtgtaaggaagggatccagtttcagctttctacatatggctagccagttttcccagcaccatgtattaaatagggaatcctttccccattgcttgtttttctcaggtttgtcaaagatcagatagttgtagatatgtggcattatttctgagggctctgttctgttccattgatctatatctctgttttggtaccagtaccatgctgttttggttactgtagcctagtagtatagtttgaagtcaggtagtgtgatgcctccagctttgttcttttggctcaggattgacttgatgatgcgggctcttttttggttccatatgaactttaaagtagttttttccaattctgtgaagaaagtcattggtagcttcatggggatggcattgaatctataaattaccttgggcagtatggccattttcatgatattgattcttcctacccatgagcatggaatgttcttccatttgtttgtatcctcttttatttccttgagcagtggtttgtagttctccttgaagaggtccttcacatcccttgtaagttggattcctaggtattttattctttttaaagcaattgtgaatgggagttcactcatgatttggctctctgtttgtctgttgttggtgtataagaatgcttgtgatttttgtaccttgattttttatcctgagactttgctgaagttgcttatcagcttaaggaggttttgggctgagaagatggggttttctagatatacaatcatgtcatctgcaaacagggacaatttgacttcctcttttcctaattgaataccctttatttccttctcctgcctaattgccctggccagaacttccaacactatgttgaataggagtggtgagagagggcatccctgtcttatgccagttttcaaagggaatgcttccagtttttgcccattcagtatgatattggctgtgggtttgtcatagatagctcttattattttgagatacgtcccatcaatacctaatttattgagagtttttagcatgaagggttgttgaattttgtcaaaggccttttatgcatctattgagataatcatgtggtttttgtctttggttctgtttatatgctggattacatttatagatttatgtatattgaaccagtcttgcatcccagggatgaagcccacttgatcatggtggataagctttttgaggtgctgctggattcggtttgctagtattttattgaggatttttgcatcaatgttcatcaaggatattggtctaaaattctcttttttggttgtgtctctgcccatctttggtatcaggatgatgtcaggatgatgctggcctcataaaatgagttaggaaggattccctctttttctattgattggaatagtttcagaaggaatggtaccagttcctccttgtacctctggtagaattcggctgtgaatccatctggtcctggactctttttcgttggtaagctattgattattgccacaatttcagctcctgttattggtctattcagagattcagcttcttcctggtttagtcttgggaaggtgtatgtgtcaaggaatttatacatttcttctagattttctagtttatttgcatagaggtgtttgtagtattctctgatggtagtttgcatttctgtgggatgggtggtgatatcccctttaacattttttattgcgtctgtttgattcttctctctttttttctttattagtcttgctagcggtctatcaattttgttgatcctttcaaaaaactagctcccggattcgttaattttttgaagggttttttgtgtctctatttccttcagttctgctctgattttagttatttcttgccttctgctagcttttgaatgtgtttgttgttgcttttctaattcttttaattgtgatgttagggtgtcaattttggatctttcctgctttctcttgtgggcgtttagtgctataaatttccctctacacactgctttggatgcgtcccagagattctggtatgttgtgtctttgttctcgttggtttcaaacaacatctttatttctgccttcatttcgttatgtacccagtagtcattcaggagcaggttgttcagttttcatgtagttgagcggttttgagtgagattcttaatcctgagttctagtttgattgcactgtggtctgagagatagtttgttataatttctgttcttttacatttgctgaggagagctttacttccaactatgtggtcaattttggaataggtgtggtgtggtgctgaaaaaaatgtatattctgttgatttggggtggagagttctgtagatgtctattaggtccgcttggtgcagagctgagttcaattcctgggtatccttgttgactttctgtctcattgatctgtctaatgttgacagtggggtgttaaagtctcccattattaatgtgtgggagtctaagtctctttgtaggtcactcaggacttgctttatgaatctgggtgctcctgtattgggtgcatatatatttaggatagttagctcttcttgttgaattgatccctttaccattaagtaatgtccttctttgtctcttttgatctttgttggtttaaagtctgttttattagagactaggattgcaacccctgcctttttttgttttccatttgcttggtagatctttctccatccttttattttgagcctatgtgtgtctctgtccatgagatgggtttcctgaatacagcacactgatgggtcttgactctttatccaatttgccagtctgtgtcttttaattggagcatttagtgcatttacatttaaagttaatattgttatgtgtgagtttgatcctgtcattatgatgttagctggttattttgctccttagttgatgcagtttcttcctagtctcgatggtctttacattttggcatgattttgcagtggctggtaccggttgttcctttccatatttagcacttccttcaggagctcttttagggcaggcctggtggtgacaaaatctctcagcatttgcttgtctgtaaagtattttatttctccttaacttatgaagcttagtttggctggatatgaaattctgggttgaaaattcttttctttaagaatgttgaatattggccctcactctcttctggcttgtagagtttctgccgagagatctgctgttagtctgatgggcttccctttgagggtaacccgacctttctctctggctgcccttaacattttttccttcatttcaactttggtgaatttgacaattatgtgtcttggtgttgctcttctcgaggagtatctttgtggtgttctctgtatttcctgattctgaatgttggcctgccttgctagattggggaagttctcctggataatatcctgcagagtgttttccaacttggttccattctcccggtcactttcaggcacaccaatcagacgtagatttggtcttttcacgtagtcccatatttcttggaggctttgctcgtttctttttattcttttttctctaaacttcccttctcgcttcatttcattcatttcatcttccatcgttgataccctttcttccagttgatcgcatcggctcctgaggcttctgcattcttcacgtagttctcgagccttggttttcagctccatcagctcctttaagcacttctctgtattggttattctagttatacattcttctaaatttttttcaaagttttcaacttctttgcctttggtttgaatgtcctcccatagcttggagtaatttgatcatctgaagccttcttctctcagctcgtcaaagtcattctccatccagctttgttccgttgctggtgaggaactgcattcctttggaggaggagaggcactctgctttttagagtttccagtttttctgttctgttttttccccatctttgtggttttatctacttttggtctttgatgatggtgatgtacagatgggtttttggtgtggatgtcctttctgtttcttagttttctttctaacggacaggaccctcagctgcaggtctgttggaataccctgccatgtgaggtgtcagtgtgcccctgctggggggtgcctcccagttaggctgctcaggggtcaggggtcagggacccacttgcggaggcagtctgcccattctcagatctccagctgcgtgctgggagaaccactgctctcttcaaagctgtcagacagggacatttaagtctgcagaggttactgctgtctttttgtttgtctgtgccctgcccccagaggtggagcctacagaggcaggcaggcctccttgagctgtggtgggctccacccagttcgagcttcctggctcctttgtttacccaagcaagcctgggcaatggcgggcgcccctcccccagcctcactgccaccttgcagtttgatctcagactgctgtgctagcaatcagcaagactctgtgggtgtaggaccctctgagccaggtgcgggatataatctcctggttcgccgttttttaagccagtcggaaaagcgcagtattagggtgggagtgacccgattttccagatgccgtctgtcaccactttctttgactaggaaagggaactccctgaccccttgtgcttcccgagtgaggcaatgcctcgccctgcttctgctctcgcacagtgcgcgcacccactgacctgtgcccactgtctggcactccctaatgagatgaacccggtacctgagatggaaatgcagaaatcacctgtcttctgcgtcggtcatgctgggagctgtagaccggaggtgttcctattcggccatcttggctcctcctcctagttattccatatgtaaattgttatatcttcttgatgaattgagatttttatgtagtcatctttttttatcaataatccttttgccttgaagtctattttgtctcatactaataaaactgtaccagtttttaaattagtgttttcttgatttttctataaatttgacattaaatttttgttttattttaaatttttgtatgttaagctttagatggtgtctcttgcaataacttagagttgtattttctttttaatccagtctgacaatatttgtcttttaaccaggtaatctaggcagtttacattgatcatgattaatattatatttggattcatttctatcatcttataatggtttggactgaagtgttgatctggattgttgcacatcccttggttgaaagatgttacagccactgaatcacccaatcactgatccacatcctattattttgaactatccctatggcccccaatagcatagtgacttagggttaaatggcagtgtaaaaggatacaggaggctgggtgcagtggctcacgcctgtaatcccagcactttgggaagccaacgtgggtagatcacaaggtcaggagttcgagactagcctgaccaacatggtgaaatcccgtctctactaaaaatacaaaaattagctgggcatggtggctcatgcctgtaatcccagctactcaggaggctgagacaggagaatcacttgaacccaggaggtggaggttgccgtgagctgagatcacaccattgcactccagcctgggcgacagagcaagactccatctcaaaaaaaaaaatgtatacgggaactggagatggtaagtgggctgaagagcagtttcaggaaagaagttcatcatcatcctatatttaaaggactatgatatgtgtataaaagagggattaaaacatgagcagcaaatgacagaactagagcaaatgagtggaataataccttattccttgagcagctgttatgtgccaggaaaattgctaaatacttttcacatatagcttaattcatacaacaaaccactgagggaagggctcatcatccttatttcataggtgagaaaaatgaggctcagagagattaaagaagatacttgaagtcaaacaactagtaactggcagaattgggaatcatactcaattttgtatgactctaaaacccttgttctttttactgaattacatcacagagaggtgaactggtaaataccaaatgaaggaagaatactttttataattaaaattcataaaaaagtaatgaactatcatttgaaatggtaagcatcccatcactgggcatttctaaacagaggtaatgtggtcatgtgtcaggactgttatagtgagagttttactttgagtgggaagttgtactttagaacagacgcttggattagatggtcattaattatggtctatttcagtttccatgaggttattgaaactgtgccagagcttaacaaatgcatgattttcaaaactctccctaccttctgaaactagccgcaatgtgaacttgtcctttcttcacttagcctccttaactcactgcagtgttatgtgatgtgtacaggtggggactttaataaaaccctatttgatgatgacttgatgaaagtctatttggcctgtttagataggagaaaaacaagtcatgtgtataagtgcagtgtaaggttctttaatttgaaatactggagccaagcaatgcaaaagctgagagactccatttaatagcatgttaatatattaaaacccttaataataaattcatagcacttaaaatacaaatatttctacaatgtaatattattttacagatggtatttagtaaatagccagtatttactgggaagtggggaattcattgtcctttgtgccttgctttgttgacacattctaccatgtgaaggccaagagcccgtaagaatagaaaaacctttctgtcagcagcagcctcatcaagctggtccctctgtagactctgctctgtccacttattttctttatccttactgctaatccatcaagtaaccatttcgccttcttttaaagcccagccacaagcattatttcttcccggagctttcattgacctgtgcctctccctgcactgtacctctcgaggtatccagtagtggcagttgaagtatatgaagaaggattttatacattatttacttttgttctgagtagttcttttaaaccttgtgaaagcaatttcacaagtgtttcctatagtattgctctgatgtggataggaaagacctcattatagcctttggacatgaagaaactgagacatcaggaggctgagaattgccaaatagtggtagagttttagcatctttcagctccacagctctactagccaaatgtgcgttccaaaatatttcccacaggtttctgactcttggattttaagtagtatgttatggctggtacctgggatttggtgtatttaaaatttgtttgggccagtcgcagtggctcacgcctgtaatcccagcactttgggaggctgaggcgggtggatcacctgaggttgggagttcgagaccagcctggccaacatgttgaaacgctgtctctactaaaaatacaaaaattagccaggcatggtggtgcacacctgtaattccagctactctggaggccaaggcaggagaatcgcttgaacccaggaggtggaggttgcagtgagcagagatcctctcactgcactccagcctgggtgacagagcgaatctttgtctcaaaaaaaaaaaaaaaaaacactgtttgactcattatttgaatgggccaagcaagggctgaccaatgcatagagagaagtatggttattgaatccctactagaatgtgaacaaattttgagaaaggcctaccattgaggtgagtgtgctgtaacctgagcacgtgagaccaaaaaaacacctgagaaaaatttttgctttcaaaattcatccatgtgactctatagattggatattctggtttcatccatttagccccaaactgacagagggttgtcttgggcagtcagagatgtgtagtgtaaagattattgggcactacttaggagccaaaggttctaattatggagcgtcttaagattagattcatcttttttactttcctggcctcagctctctcttatggcaagtgaggggtttgcaatgaggtcagtggttctcagaccatagcctttggagtacatggaccagaatcgccaggttatttgttaaaagttgagatgctggactccatctaggcctactgaattggaatctctggagtggcacttgtttatctgccttttgacaagctgaccaaatatgcacactaaagtttgagtacctctggatgatgtagattctaaggttccttccagctctatgatactttgaatgagaaagacaaagacagacagcaattacggatttcatttcaggtttctttactattctttaatgtcagagcctttagtgattttaaatttgccagaaatcacctaattagcatgtgatgacaatatactattttcattttttatgtctgcctcccccagcttattatcagcattgtttctatttcttttgtgcattactacagtaatcatcaatctcttcttattcacttccatcctttgtatcatcatcagagatttttggtgttgtttttgtccataaaacaacaaacacaaaaaatgtccctcacatgattaataagttgcttttttttctggcaataaaaacccttaatttctcagcatggcttactagacctttccaagtattatttatctttgtagttttatctcccaaatttttacccacatccagccaggaatcctttaattctcaaactagtttaggtagctgattacctagagtcatcttgtttctttctttcttattaaatatgaaatagctttatagttaacttcattgtacgatctggtacaattttattcatagaaaatattactatatgataacattttagaccgtaagcatttattaataataaaaaaaaaccaagcactggatttagtttggctctctctgagttttttacctaatatattttctatcttttttaactgtttgctacctctttctgttagaaaagtgaagaaaaataccaaagaaatatttttgtaagaataacttaaaattaagagtattccacatatcaatttaaaaacaaaatttcaacagattgctacagattgcttttatatggtttaaataataaattactttgattccatttatggagcactggtgttttttgtgaacgctgttaggtaacaggacctgtgtccctgtggttctctttctggaatgcctttctgaagcttctcctcttaaagaattcctgctcatttttcaagacccagtagatttgtcaccaattgcaaagccttttctgaccctcatagaaataactatcaactctctcctctatattttccagatttcttggtatgttcatctctacttaaaaaactaatatctaacatcattataataataatgattattctgtttatctcctctcttcctctcttgcctctatgggtcctggcacaaagtttatgttccataattgatgttaaatgaatgtcttgttttgactaagatatttgttccttaagaaccttatccgtcttacctttattctgtaggaccaagaacacaagatcttatgtgtacccatttagcgatgacagactgaccaagtgatctggcttttctccacgctctgggaaatagtttaactctgtcaaagagcagtcaagaaaagttcatatattgagagtgatgtgatgatggctgtttgaaaagcttggaactacctttttagatcaaataggcttggttctgtctcaaatctggattagggccaatactttgataacccagtcagcaaagatcagaagtcaagaattcacaatctttcatcgtgctctgaaatcatttgtcaataaacaacaaagaccttctagggctggatattagagagggaagtagccgagagcttggaaggggagcttttctatcagctgaggactctggatgggaaaaaggcttagttcaggtctggtaaagaatttgagaataagcgaaattcaaggacacagtagtcaagaaagtgtttagtactgggtgttggctcggatgtgaggaaaaaggcactttacactgttagtgaggacagaagtagaaattggtacagcctttctggagtgcagttctgcaaggtgtattaaaaatgttaaaggtgtttatactttttttcccaccaattctacttctaagaatttttcctaatgacatactctaataagtataccaggatttttgtataaagaaatttatttagaacaactataaaggtcccaaaatagggaactgattaaacaaattgattaatctatacaaggtaatatcacacaggcattcaaataatgatgtagagatatatttatagaaaaggaaaggggtatatgatgtattatcagatttaagaatctatttatgaaataataggtagattatgattattttttgtaaaacagatatatacatgtatatatatattttatatatacacacacatatgctacacaatttatggaagttgtcaatgagagattttttttagtttaccttgatgttacaaattttctacagataatatataatactcaaattataaagaaataattttttcaaactatatttttcaaaatatttcaaaaatttcaaaaataattatttttcaaaataattttgaaaaagttatttcttatagaagggataattctttcagattggtattctccaggttgactgaatagtgcttggaacagagtacatgtgtgatatgtattagcaaatttaatgactgagtgaataggcaaatgactttactccaaacttggtagtgtaggttttattggtgagaattttctaaattttatccattcatcttccactggaactgcatctgtaggatagctgatttttgattcctgagatcttttctttttttttttttcctggttttcacttttttttttctctcttcaacttttattttaagttctgggttactagtgcaggatgtacagatttgttacgtaggtaaacatgtgccatggtggtttgctgcacagatcaacccatcacctaggtataaagctcagcatccattagcttttcttcctgatgctcttcctcccctgaaccgctctcccaataggccccaatatgtgttgtttcccccagtgtgtccatgtgctctcatcattcagctcccacttataagtgagaacatgtggtgtttggttttctgttcctggattagtttgctgaggataatggcttccagctccatccatgtccctgcacaggacatgatcttattcctttttatggttgcatagtattccattatgtatatgtaccacattttctttatccagtctatcctggatggtcatttgggttgattccatgtctttgctgttgtgaatagtgctgcaatgaacatatatgtgcatgtatctttataatggaatgatttatattcctttggttatatacccagtaatgggattgccggatcaaatggcatttctgcttctagatctttgaggaatttccacactgtcttccacaattgttgaactaatttacactcccaccaacagtgtaacagcattcctttttcttcacaaacttgccagcatcagttgtttcttgacttttcaatgaaccaccattctgattgcataagatggtatttcactgtggttttgatttgcatttctctaatgaccagtgatgaaaagctttttttaatatacttgttggttgcatgaatgtcttcttttgagaagtgtctgttcatgtcccttgcccactttttaatggggttgtttaattttttcttgtaaatttgtttaagttctttgtagattctagatattagacctctctcagattattagattgcaaacattttctcccattctgtaggttgtctgttcactctgatgatagtttcttttgctgtgcagaagctctttagtttaattagatcccatttgtcaagttttgcttttgttgcaattgcttttggtgttttcataattaaatctttgcccatgcctctgtcctgaatggtattgcctagattttgttctaggttttttatagttttgggttttacatttacatctttaatccatcttgagttaatttttgtataaggtataagtaaggggtccagtttcaattttctgcatatggctagccagttctcccagcaccatttattataaagagaatcctttccacattgtttgtttttgtcaggtttgttgaagatgagatgtttgtaggtgtgtggtcttatttttgagttctctattctgttccattctatgtgtctgttttttgtaccactaccatgctgttttggttactttagacttgtagtatagttttaaggtgggtagcatgatggctccaactttgttctttttgcttaggattgtcttgactattcagcctctttgttccatacaagctttaaaattttttgttctaattctgtgaagaatgtcggtagtttaatggaaatagcattgaatctttaaattagtttgggcagtatgaccattttgatgatattgattcctcctatccatgagcatggaatgtttctccatttgtttgtgtcctctctgatttatttgatcagtggtttgtaattctccttggaggggtccttcacttcccttgttagctgtattcctaggcattttattctttttgtaggaattgtgaatgggagttcattcatgatttggctctgcttgcctgttgttggtgtatagtaatgctagtgatttttgcatattgattttgtatcctgagcctttgctgaagtttcttatcagcttaagatgcttttgggctgagacgatggggttttctagatataagatcatgtcatctgcaaacaaagataatttgacttcctctcctcctatttcagtaatctttatttctttctcttgcctgattgccctggccagaacttccaacactatgttgaacaggagtggtgagagagggcatccttgtcttgtaccagttttcaaggggaatgctttcagcttttgcccactcagtgtgatattgcctgtgggtttgtcatatatggctctgattatatcatgatatgaggttacatcccttccttggtatgagtttgtgccccttcctgtgtctgagtgttgacgatatatttctgactggtcattagttgtttttgttcatttcattaagggttttgagagtcaggttccattaaccagtgtcattccaccattttattctgtgacttcttttggtgctattacatttagaaaattcttcctctctaaaatgtggtaaatatttacctacttagcttttaaaatatattttcatttaattctaaaatgtatttgaaattaatttttatatgatgtgaagtgagaccacaagttgatatttttcttttgaaatacataaccagttttacacaaaccgtttatagagtagtccattttttccatattggtttatgatgtatgttctgtcacatattaagttataatgtgtacaaggctctatttcaggcctgtttgttttgttgtgttaattcgtctgttgattcttataccaccattacactattttgtatgtgttataaaaggcagtttaatattgagtttgggtacatttccactgattttacttttttaaacagttgaactattttcacacacaatatttgccaaatgcaatgcttgacattatatcaaaaatataaattaattttggaataattaacatgttttattatgtagtctacctctccgggagcatattttatctttccatttgtttaagttttcttctatcttgcatccctcaaggttttacttaagaaatttatagtttgtaagtattatgtattgacctttccctcattacattttctaattattgttagtatatagaaaattgaatcttgaatatgtattttataattagtgattttcttgagtattattattgattttggttctttttgtatcttttagaaaagcaatcataccttctgcaaataattataacttctattctcttttgaaatagttgtatcttgtttcttttcttgcatgttagtatgatcttggacatccttaccttcctcctgattttaatgagagcagctttaataatttgcagctaagaggtaactggcctaaaagaaattaggaaatacacttagcttcctagtgaggcttaaaaatcagaaaaaaaaacagtgttgaattttatcaaatgatcttttgttctttttttaaaataattatgtcctcttatttgacctagtgatgcaatgtgttatattaatatatttctaatattaaacaatccttgcatttctgaggtaatccctacttgattatgctgggttattgttttaatatactttgacttaattttccagatttgttatttagaattttcacaactgtattcataaataaaacttgtttggaagaacatttcttgaaatgcattctaagaaggaatgttatgaggaagaaatggttccgtggtcaaatacacttgagaaaggcagattaaaacattttaacaaatttctttgctttaggtttctcagagactttaatatgctaatacatgctgtaatctctgagggagtgcttttcaagcacactcacaatagattccattcccccctcagaaagtgacactaatttccacagaaccctctttggaatattaatcattgtcatattttgttatgagggttatgtcaacgtcataaagtgagttaggatagcttttcctactttaacctaccctggaatggattatataatgcgggtctcataagtttcttgaaaacgtgaaaggcctagaaccagttttgcaaattatcccttaataacatttgctaaattttccatggctattcagctttcttataatattgaatcaatgttattaattcatatttctagaaaatggttcactttattgaaatttttaaatttgttaaaacgtgattgtgagtggaattctcttttaattcttaaaatatgtttcatttacctgttggtaaatacaatgaaatgaaatgatctgtgccaaatacttgaaacagtgcatggcacatggtaaatggtaaatgttttatttcctccccctttttcttattctgtatctttctttttcaaaaaatttagatttgtcagaactttgttgatttaaaaactttgtttcccagataataacctcttctgcttatcttttaatctacttatctcttccatctatttatttgattgtttaaaaattcatcactgttcaccctagatttatattttattcttcctgcttttttatagtttttttctttcttttctagctagcttcttgaattgattgaataattcttttaaaacaaaattcttgattagtaatgaaaatattcaagtctatcaatttgatttaaaaatagttctgtattttgtggtcctttatgcacattgtacaaaactcaaagcatacaaaagggcttacagataatagtgaattttcttcattctcctgccttagtcttcttgttcctcaccaggaggtaaccacaattatgatgttcttgtgtttccttccagaggtattctaagtggatttggctattgagtacagctttgtcagaactatatatatttttatttaattattactttcattattttaaaatagaatttgctattaatttaaatttctcacttgatacaataattaggagggtcaaattaaaatacttattcataggacattttttgttattaatttctagttttgctgcattgtgattaaagaatgtagtctataatttctgctactttgaaagtcctgaggttaatcatgtgaacaattacaaggtcaaatcttataaatattttatgaaatattttaaaatttataatcttcaaagggcacaaagtatataattaattcaaaataatttttatttattgtggtttacttgatctattacagacagcaataaatttatttccttctcaaatcgaaattttgttgttttatttatccttataataacttaaaaatttgtatgccataatattttgcataaattatgattatgataaattatgatgctatgagaataaacacaagcataaaagcaaactctggcttgtaaattttattaaataaataagtcctgaaagtaacacctatgccaggatataaacattcaattagtgcagcaggatatcaaattagaagtaaaatttttgttcagactccccatttctaatctcacatttcagtcataattacttttgaatgctttgtatttcttctaatagttacctccataactctaaataatgtgtttagatctttcattcttaattagtaactatagactttatctattgattcttcgatatgaaagagtaaggctcaagttatttatactaccctaagctttccttttcaaattcttcccaattgtaatttttttcttagatgaataacttttgtaatttttaaaaatacttaagcttcaacttcttgattcatcaactttaaacattttttggactcttggttattttttgactcttggggaatgaatttcccaatttagcattctctatgtcttcctttctctactgtctgactcctgttagctatgttatcactttatgtggggaatgtttagagcattctgttctctaattctaattaaattttctatactttgtaggttaattctgaaagtcaaatactggtggaattttaatataatagttatataaatattcatttcatgtttgaggaatattgggtatgtagagaaagcaatgcaactcaacacctacgcccctttaaggagaattttctaaaggtcaagattaaatggattttctctttctattttaatatttcatccattattcagactattgtcatgatttaacttgtttcatatttggaccattcttgggaaatgttttgggtttaattgccttttttcttgagaaaagaaacacatatctttttaccatattgccaatatcttgcaattgtttaatgctttagtaagtatcactctatttctaggtctgtttcaaagctgtcaccctgatatttctctttattccacttctagattagtttcactatttcttagatcctgtgtactcccttttaagaacatttctttttcctccccttcaggacatttattcaagtgattttttttccataaagggtgcatgggaggtaaacttcctgggtccttgtttttctgaaaatgtatttatttttccctaatccttgactgatagttttggtaggtacagaattctagatttaaaatgatttccagctgagcgtggtgactcatggcgtaataccagcactttgggaggctgaggtggtagatcacttgagatcaggagtttgagaccagactggccaccatggtgaaaccccgtctgtgctagaaatacaaaaatacttagctgggcgtcgtggcgcatgcctctaatccaagctacttgggaggctgaggcacaagaatcacttgaacctgggaggcagaggttgcagtgagccgagatcacgccactgtactccagcatgggcaacagagcaagactccatctcaatgataataataataataataataataataataataataataataataatttcttattagtaatttgaaggcattgcttctttgtctttcagcattgactgttcctaataaaaagcctgaggccaagtttattctctttactttctaggtaacctgaagtgctctatcacaaattatattttcttcagtttcattctgttcttcattattgtcaatatgcttttaaactcttgattttgttttgggtttccttatattttcatattttagccaattatttttttcagcttgttctctatttattgtgttctgaccttgtttcatagagatgatgaccttttacatatttatgaagacagcaaaactggtttaaattttcactgagaaaactctttttagaagtttctctttctttgaggttttagagagttatctattttttctgttgttgaagtatctttttttccataatcccattgttggctctttttctactttttcattcttgaattgtgtgagatttatccaggctttgtctttattaacaaaaataataggtgaattattttttgcttcacttgccgttcacacattttgcccagatttaaactaaaattttaatttgatggttttttcaaatgtctaacgggctttcatctgtcatggatttaggtgaattaatacaactcttgcattttttaaactgtaaggttacatgtaatttgaagttgtttgaatagtgtaaaacattaattagttttttctaaataactgtgcttccactcatgctgattattttgctaagttaagagatctgaggtcttttagcaaaagtaaaataagtagagctcatagaatgggaagactggtttgtgtaggagcccatgactgcagtaaagaaagttcccataagactgattgctgctcactatatttctcaccactgtagcccctgtcttctgaaacatggtgtaaactctatgggtaatcaacatcttttcttatatttttttgagaccagaatggaaggaagcacccattttatgtggttgtaaaaataaaatatgtgatgtatggtctaaaactacacctgccaacctattactgatgatacattaaatggaatttttatactcatagtaattctgatctttggctttctgtactttgccagtcaatgaaggtgtgtgcatgtgtgcatgtacatatgcgtgcatgattttttcataatgggagatgggggaggccctatcatacataatagcctgctgcctgctgccatgttaagaagtccaaccattagtctgttttgataagctaggcatctcaagtagccctattgatttttctttagttcttcttcttttttgttttctgttcatttttgtgtttttaatttatcctaggcagttgaattaaattgtcttccacttaattcatctcagcttccctcccagtctttttatgtccaaagtccttcaccagtcttcctattgcctccagattgtgagccaatttcttgaaggtggagccaagtctcactctttatatctccgtataatacatgtttcatacatacctactgataagctgatcagcttaatgatggggatagaagtgagctcctactcctgttttttccgtcaaaggtaaaccctggaaaaggacaaagttcgagtaatattttctacggagagcttggaactcagacgtcttctatggagttctcatcttcttgctcccttgccttttggtgagggaaagaatatgccacctgtcttgtctcctgggaccatgccaataagtgtgctgccccaggggctctgcaggatgggtttgttctcctgctcaccttgctccatccctgccctacctttcatctgctttcaggaggctcaaattgttttcttgtttccttctttccctttcccccaaacctccagtaaagaagagattttggtattaagaaaatgggctgttgaattccaaaatcagaaatagaccacataaatatgtatgaagcattaaaacccttcttcgaagtgtgatttcctggctaatggatgcttctgggatgattattatatatatttttgtactcaattaagccctattcagaccaacttattttttggtgaacttaaggaccttatgattagcatccattagcatttccattacatctatattgtaataataccatctaaaatttctatgctgtatctctcacagagtgcttttatgccattattttatttgatactcccaacaacaccatgaagaatgttgagattctcttaacatttttgttttatagatgaggagactgaggtgcagaacatttaagcgacttgtccaaagtcatgcagtgagtaagggagtggaatgctgactaggagccatgtcctcagctagtatggcaagggcatgctccctatcactgctagtaatagcaaatgatcactaccactgagtatttgcatcatgccagctactatattaggctctctgtatatattttctcatttaatactcctcataaccctgcaaagtaggaattgttattattccccccgttacatagaggggaactgcaatttagagaggttacgtaacttggtccaagtcacacagctagtcctagtatacctaggactatactgcagttggaacccaggtttccctgatttcaggcctcagccctagccacgtgggtccctcatggttttactggactgagctatgaagatattcaacatagcatagctcataaaggctgttccagttctcatgattccctgagctgtgattacgagctctccttgtgactcctatggctctggggcatattgccagaggtaaaattgggagctgtatggatcagaaaggcagagaaagtgaagggactaatatttactgaatgcttactatatgcccagtggccattaaaacccatatcacaggaaccttgtaagtctggtattatcatttccactttatggaggaggaaacacaggttcagagaggtaaagaaacgtatgcaagattgtaagtggaagagtcaggatttttagtcaggtctgtcagaccttatagcccatgttttctcctctatgcctaagtaggagtgggctcagtggtgatgttttaagggctaatgttgatgttttaagggctaatgagaaggagcagtatttctaaagggcttaaggaggattataaggaacagagatgaatttagaccctggtggttataatgcattataatcagtactctggagccctataaaggaactcataagagaacccaaagagaagaaaaactgtggcaagttttaggctacattgcctagcttatatcacaatgccagcagccttcaactgcaatacgtaggaactgggacttaaaaaccagcagaaacacattggtaaacatcataatgacacgcatatttaggaaaatgatgtttttaatttcaaaatctatgcagccttgccttatatagtcagtgctaggaagttgtggtgtaccaggaaatgatttacattttagccttaggcaaaaatatggaacttgtaattatgtcagagagaggcaaaaccttccagattttacagctttaaagctgtaaaagtctcagttaggatgtgtgttgattaaactgtggtgtggctgagcattttgcctgaaacttcatagggaataagcatctgttaatgactttcaggtaaaaaccttccttctaaacctttaatgcagtattgtcaaaatgtggaagtggtgggtgacaagcattttcttgttccttctaaggccttcctgatccaaggtagttttgagcacaaacggctgtgctggttaagcttttggcttgtgggaagaaagccgcacatcaactcctgatacgcacgagctagcctgaactctgtgatgaccatcagatgcagataaactgccagacagagaagctgtcttgtagatgtgactttgctgccttcaagagcagggctttctgcacctatgctctaagcgcccttagtgttcctctcccagtggtcctggattgatttctctaatggggagcctcctctgtagggtctacaaggtgactggtggattgattgccctactccacgtaatgtgagtaggcgattgtaaaggggaggctgaagagcttgcctgttttctttgttattcttcttactgagagaggtggactagagtggtagttcaaagatctggctctgcagtcacagatctgggtaccaatcaaggttctgtccctgattttctgtgtgaccttgagcacatcatttatcatctctaagcctctttctcatcttttaatgctttattcacaatacctggttcacaggattgttgtgggaattaaatgagataatgtgatattaagtccttaggacttttaaagttgacatagtattataactgttacctccgctaatagcgtcaaaccttgggtctaatcagggctcagtctctttactatttgtgtgaccttcctaaccattttgccattctgtctcccttctgaacatagcaaatataactagcttgctttggccttcaaattaatagaattcatcagccacagatctctgtgagccacttgctctgtaacagggaaggagtatgtgtgtctggcatgggagcttgccaagaatatttgctcaatagctatgctattataccatcacgtgctgctgtggctttataggaagtatatcctggatggttattacatatttagctggaatttagtttcctagggaaataaaagtttcatattttaagaatagacaattattttgaacaagtggtttatgtccacagaaagttcatgttcttatcttttatgtttgaatgaaggcactgtgtatgaggtgtccctgaacattggaagtctaaagagcatggatttggatgtcaaaactgggtccagattgaagttatgacatggaccacctgtgagagccttaatttcttcctgtgtgaatgtaaataatacctacctcatgggattaaaagagaaaataatataagaaagcatatatcatattatgtaacacatagtagcctctcaataaaagttactggttactattttgggcagatccaaacattatgttaataaatttcaatggctcccacattttattctttggggtggcacattctgtagagatatcttaggggctacagagggacagtgatggagggactaaggaaatagtatccaggctctctgccccacttcccaagaagctctgcttatgtctgttttatatctagggcatctgagattgttttacgggggagaaagaaggctttataagtgctttcagttcaatttattaatttttccctcaatgaaccgtagttttagtgttgtatctaagaaatctttgtatatcccaaggtcacaaaggttttcttctagaagtttttatgatttagagttttaaatttaggcgtatgatcaattttttagtccatttttgtttatggtaagaggtgtggtgtattagtttgctaggactgccataaagcatcacagattaagtggcttaaaaaatagaaatatattttttcacaattcttgaggctggaagtctgagatctaggtgtaagcagggttggtttcttctgaggcctctcttcttgccttatagatggccatcttctccttatgtcttcatgtggtctcttctctctgcctgtccctgtccaactttcctcttcttataaagacatcagccatattgggttaggacctacccaaatgaactcattttaacttaattacttctttaaagactatttccaaatgcagtcatattctgaggtactggaagtcaggactttaacatatgaatttggggggtacataactgagcttataattcatggatgaaagtgtttttttcccatatggatattcaattgtactagtgtggtttgctgcaaagaacctcctttttcactgaattgcctttgtacctttctcaagaaacagctgtccatataaatatgggttgatttctgcactccctgtttcgttccactgaactatttgtctatctttgctctaatatcatactgtctggattacttccattttataatatgttttagaattgacaaactggacttcctcaaaatgaaacatttctgctcttcaaaagacactgttaagggaatgaaaggacaagtcacagacagggagaatatatatatatacacatacacatctgcaaaaagtagagctgatatgggactactcatatccagaatatataaaaaactctaagatataaataataagaaggtaacctaataaaaaaggacaaaagatttgaacagatacttcaccaaaaaagatatgtgactagcaaataagcacatgaaaatatactcaacattattagtcattagagaaatgtaaaataaaaccacaatgagacaccaatacacacatattaggaatataaaaagactgaccatatcaagtgttggtgaacatacagaggaactagaactctcatatacttttggtgggaatgtaaactggtacaaccactttgaaaaacaacttggcagtttaaaaaagttaaacatacacttacatggtccagccattctattactagaaatgaaagcatatgcccatataaagagtacaaataaatgttttacttgttatagccctccttgttataggagttttacttgttatagccccaaactggaagcaacccaaatctccatcaataagtgattggataaatgaactgtgttatatctatattattcagcaataaaaaagaatgaactattagtgaatgctaccacatgagtgattgcaaaataaatatgctggatgatagaagccaggtataagacgcaaacatgctaaatgattccatttgtatcaaactctaaaacatgcaaactaatgtacaataacagaaaacagatcagtgccagtggtagaagggtaggaggaaaggaacaccaaggagcctgaagaaccttctgggagtgttccttataatacgttcattatcttaacatatattcattcagttaaggaacacatgttcattattttaactgtgataatggtcttatggatgtaaacatatgtcaaaacttattaaattatatatgttaaatatgtgcagtctattatatgttaattatatttcagtacagctgctaaaaaagtgataaaaaacatttgggccaaatatgaaaaacccaagactaaagtgaaaaattacaagactgttactgatcaatgttcaggcctattaaaatttcccctatcccaatggcacttgggcaactacttttcttgtatactttaggaagtatctaattcagacaggggactaagaagagactcttcacagtgcttgctgatagccccaaaatgcagcatgaaaccacccaaatgccaagacaaattgagaaaggttgacctttaaaatatgtagagttcagtacctttgaattaaattgcatgttcagctttggttctagttgctagaggctacttttttcaagtccacaattggctcccccaactgcgtttgaaattcagtaaaaccagcctttgcacctgcctttgttaaaatctgtacctaaattgtttggaacaagaaagaatagtaactagaagcagatttactgcagtctggacttagttgtttgggtgacctctttttgctggttttctgggttgattagactttgctaattgacagagtgtttggcgcaatagcccaggcagagccattctgctctggacttggatttggtacaagtattcctggtggtcaagtcatgtattttctagtttggaaacagacgttggaacaggactgctggagcaggtttgcaggattctatggtggagaaactataatgactttcaaaaacatgggccaaggtaatttggctgtcttttcattcccatctctaaaagaaagaacccaccaaagttcagagcatcttaaacattttgaagttgtgacagtgaatgtgaataattggtgtctgtgggactctaagggtagaaagcagggcttactagtgcttcttcttatttaacagagaagagcctggaaaaaaaaaaacctatagtcagacataaacatttcagccttatttattttcaaccagggaatagctaataccacgatgctgtaaagttcttgcatttaaatgtcctatttcacaggtccaaacccatgttccacatagtagtattataatagcaccatggagactatccagtaggatcctgaaagtcttcttacccactcttttccattttgctaagcacctggttaaattaaaattccaaacagtattattcagagacagcatggaacagcggattcttaattctggcccccccattcatcaagcacacataggccaggcaatgcatttagcactggagatactgaagtaagggattgcctctgccttcaatgaacctttggtctagagatggagactgagaaataaacaggaaattctaagcagagtgctgtgtacgatggagaaagtcctaaacagagtaatattgggacctgtaggaggccctcccactccaaaccatgagggtcaggcaaggcttcccaaaaggtaagagttacctcctcaaagaagcgggggaaattgtctcttactactctatgacaatgagcaaatcactcaaattctctgactctctcttttggaagaaataacatttactggttgcttttgaggattgaatcagatgagatatagaaaagcccttagcccagtgcttgctaggggaaagatcaatattggttttcatctttcctttcttttttcctcccctcctacctccatcaggtggggagtgtgacttccggagcacactacacagaggagacttttggagggtttttagttgtcatctctgtcacttggtgtttatcttcctgcttctagttcattagggcctttttcttctgatgctggcttgggctgtgtttatgtctttcatgtgcttctgtgacacttcatcaggggaagtggctggccctctgagcaactgctggaggcgttgggaagatgggaatcaaatgcagcctctgtaggtgggtgtggaacagaacagcagtgtggccctgtgcatgtgtcaggggcaggcagcagccatcatctgtcctcatgtcctgcctgtggggtctgatgagaaaagaatgagttagtaatgaagtagagaggagagagagctgagtgctaagtggagaataaaatcatcttcaagtataactcaggtttactctggagctgtgtatcctgcaaatagtacagtattcccactcttggccaggcactaacagctgtggaagcaaatggtgtaactgcctttagggggcgttctgactggccagcaggcattactgatgcagggaagcaatgcagaaaactccacggcaagctgggcacactttgctctctgttgctctgtgtgtcctttggtttatttttctgtgtactctcccctcctaagaagactgtgctctttccaaacccaaatcaccttcttatgttgcaaatccacctaaccgtcagaattttttcctgcacagctgtcacaacaaacttcccctcatctgctactaaatgtatcagacactgttgtgcagtctgtgagctgccgactcattatccgagggctttccaatagaatctgatgttatccaaagcttctcatctgtttcaaagggaacaatttcctgcgttctctggagggaaatcaaacgcactacgtttaggaagtaggacggtccttcacagatttagtagatcgcaaggcaattatgggctgattattcccaacttagtgtttcctcacctcatttcccataacagcgactagagtgacctgaagatgggctttttgtctttccagtgagacatcgggaaataaatcacaaaaatcaagataagttgtggtacctttgatttccctctgtcctcttcccaagccgtttttggcactccctagaggaaaccagttctcctctcctcttttacttctgcagtgggcacttgggctccaagtatcttttttttttttaagttcatcttcatcatcctttaaattaaacacctactcccctgataaatatgatgctctttttaacaattagtctttggatatagaagttgctgatgaggaaaaatccctttcagctggttacctatgcttttttttttttttttttttttttttgagacggactctcactccgttgcccaggctggagtgcaatggtgcgatatcagctcactgctgccgatgcttcccagattcaagcgattctcctgcctcagcttcccaagtagctgggattacaggcatgcgccaccatgctcggctaatttatggtatttttagtagagacagggtttcacatgttggccaggctggtctcgaacccctaacctcagatgatccacccacctcggccttccaaagtcctgggatttcaggtgtgagccaccgtgcccggccccatgcttctttatactagttctttcctcccttctcacctccagcctgggatgtggtctccactatggtctttattccatactccaaatttgtctctttccaagtatcttcctaattcctttttttaaagttacctttttaatttcctgccgtgaaacatctgctgtatcatcttgcttccgccacttcctagaaaacttgttttatgaatgttctttctcctcagtataattttcctggctgtgccctgatgtagtgctacaatagttttattttacattgactgattaagcactttgaataattgttttagctccattatggcaaatctatttggcttaacacttttttttttttttgcaacctttgattaatgcctgaccattgggacagaaaggaattggcgcattaatttccccttgacgccacggagagctgctctttttcctgtgcaagagcctgaagcaacagatgctctgtgttcgtattgcaggggagagcacacactgttgcaaataagtatgtgtgtgttcccggtcagtgtttgctaatggtgctgtgtggcagccatttcatagcagagagcaaatgttaggatttagggaaaattgtaccagcatatcagattttaaaacggaatggtgaatttttgttgagttaacagtgtgtagctagacgatgttttctttctaagctcatgaaacttaacagctgtttagtgaagcagtattttcatatatgcctgtttgacaggtttaatagcaaattttgcagtaagtgacttgctgaacaggacttctggcttgggctgtaacaagaactgtatttgcagcaagattcattgagggtctttgtgctttagtgtttacgggaaggggaagcctggctaaagtgaggaaaactgaaaggcataatccaaaggaaattactaatatctctaccagagtattcctcagaacttgttattaactagtttagaggaagataacatggggaaaacatgctgtttagcaataaaaacacatgagtacaatcagcttactgtaacccattattgctgcatagtaattaaatctatatatctccaactttatagttttctgcagcagaatctctgaaagacttctgcacttcatctgattcaaggaagcctatattctctcccctgtctctggaaaggctactgtgccttgtaatagctttttaatattgccagatcgaagacaaatgcttcactggttttactgggagaaataaagcacttcctattacacttataggggggatccaagtcttgggaaactagcactttatgaggttagaatcccttttcctttcttcccatttttgagttctctcagatcgtaggacctcagaatcactcattcctagggctacccactttgtatttggctcctaagtgcatttttcaggatttatctgtgcttttattgattgcatgtgcttagttatacctgctgattgtgggtgtgtgcatgtatgacagaatcacagatcatagacccctgttctccagggcagccaccctcatggtcagcccagcatcctcagctaacaaaaggaccaagagctgtcttacatcctctttggatttccgcatagattttgcaagccgtaaatacaaaatttgtctagagttcatagttggttctgtttactggatttttttttttttttttttttttgagacagggtctggctctgttgcccatggtggaatgcagtggtgcaatattgactctgtgcagccttcgcctcctgggctcaaacaattctcacacctcagcctccagagtagtggggactacagacacgtgccaccatgcctgcctaatttttgcatttttgtggggggtgggtagagatggggtttcaccactgtttcttaagcagcatgtaagggagcttcatatttgtttgtctcagtcccatcatgatgtaggtcaaaagcaagttacattcagctagctgtatgacaaagatgcctccttttgaacagtaagaatttaggctttgttgttttatacactcaggcaacttgaaaaggataaaagaaaggtggagaaaagaatagtaaagtgagctcaattaattttctaagaaggcaaactaaaaacttctcacatgtaaacagtaagatgtcagggacacaaaatgagttagcccgtgttgctgggatgaggagggatagcagagaaatggccatatgatgtctgagagtgtggccagtgggaggagaggggtctactggtggacttctctcagcaggttgtcacctccacactttctcatccagagctcctgggattccctctaggaaggaatcattataccatttgccctgctcccatcatctcactaacctgctatcactgtagtaactccaagaaccagtgagacaagaaagagggatgtcatgagctgcctctgcacaactgttgaattcaattttctttcttcaagactccttcccccatgtttctctaatgcccacactttattcaggatgttgtgttcagtagcagagacatttgaaatgaagcttccttatcatggcttttaggaaaaataatggcaaaactattggatacaggtgaattctagtccaatatggtaggagaggtgagcctggaattgccctttttacatatcctgcagtctgattctaataaaagtagacacagttctggtacactactatgtggttatttccagaaatataaatgagtgttattttatatatatatattatatatatataaaatatataatatgtacatatatagtattgaaccgacagtaggtacttatgccttctaaaaatgtagtagtaagtgaacataggcaggcaatataggaggtgatacctgaattagttttgaaaggctctagcacagccaccaggcatacaattagggaggagaagtggatgtacattctataccgaagaatagttccctccttataacccaaagaacagtgctgaatacatcttacatgctttgtaaataggtactgtcttgagctgttgtaacaaagagaacatattggagaagaggaggctggaggcagggagatcagttaggagattattgtggtagttcaggttgaagcaatatatatatattatatatatataaatatatatatttatatattttaatgtttataaatatataaatatataaaacattatattttaatgtttaaacttttaaaaaatcagataggtaggacttcctttttcttttttaaataataactatggaagtgcagaaataatagagattctattgtgctctttacctggcttccccattggaacatctctacaactctagtagaatgtcaaaaccaggaaattgccattggtacaatctatagactttatttaggtttcaggagctgtttctaggtgggactttctaaggattgcaaaccccatggctttttctttttaagcaggtagaattgagggtgcagtggaagcaaaggctcatgtctggtctcttcctttctttctgtattgccctcctatcccccatcatgtgaaaaatagatactagaaaactcatatcaaaaagtacagtctggatgcttactttgcagggtagtatgttaggtgcccaggaggacatgaatgactataagaagaaatggttctgtaatttggaatcgtttgtttatacagaaagattcagctcaagacagtacctatttacaaagcatgtaagatgtattcagcactgttctttgggttataaagagggaactattattcggtgtagaatgtacatccacttctcctccctaattttatgcctggtggctgtgctagagcctttcaaaactaattcaggtatcacctcctatattgcctgcctatgttcacttactactacatttttagcaggcatgagtacctactaactgtcggttcaatactagatcccaggggttcaaacatggattctacacattctctacccacaatgagttcacagtttagtggaagagagagacatttaaggaggaaaatgcagtagagtgttatcagaggtataagtagaggtatgagtagggtatatcttgaatgctgtggggtttgaacaaaggaggaaaaaatgaatttctttagaagagagataactgttgtaacaaagagaacatattggagaagaggaggctggaggcagggagatcagttaggagattattgtggtagttcaggttgaagaaagataactgaaaccaaggtggagaggaagacctaggggaagggatgggtttgggggctacttaggagctaaatttaagagcacttactgattaactgactatagagttgaaaagagtgaggtgtccaaaatggtcccagatgatggggtggtggaagtgccatgcaccaagagggagagtctgggagaagatcagactctggaagaaaactcttgacggggtatggatgtattgagtttggggtgtctgtgggatgtccaaactgagagagctcactcagttatagatgagctcaaatgatatatggtgccttgatgtgaatgactttgccagttaaagtatgtagtaggacaagaagatcaaggagaagccttaggaatcactaaaatttaaaggacagatgggggaagggaccctgcaggagagattaagaaggagagcagagtgagaggaagaagagtgtttggaaaacgagaggcagtcaacaatataaaatgttttagatgtcagatatgatagaaattgaaatgttttcattggagttagggacaaaggacattcttattgacctgtgtgagttcaatttcagctggctggttgcaggagacagcaaaacagtagatcaagtagtgatttttaactatgaaacaattaagagtttggtataaggcaatttagttaagtgctaacatggagtgtaaagaaaagtgtaattgatattaattatttaagaaaatccataatagaatgttagagcagaaatgccaccccatttttaaatataaagagagatttcaagtaaattgttcaaggtcatgcatctaaagaggaacagccaggaccaggtcccaggtctgtttactccctttataaaagaaaattctggatagactagtttaaaggagcaaatgaatgtctgttgcaggaaaagtgattgttaaaatgatgaatcagagctgtatacttctattgtgaaatataactacttgtttgatgaatttattcatgtattctataaatattaatagatattgtgctatttgtttaatatgcaaagacaaataaacaattagttgtagagaacatgcttggtgaattttataaaagtaaaatattatcgccattaagtgatatagtctagcagggtgacagacacaaaaatggtatcatacaatgtgcaattgaaaaggcaggaaatagttttgcctaggagttggagactagtgagctgaatcttgcatcatgattgtgatttctccaaatggagaaaggattaaagggaactttcaacaaagggaacagtatgaacaaaatcagaccagtataaagaaagtctataacttcacagactgttaaacagcctggtggggatacgatataaaggtagggaaataacaaagaattattttgaagactagaaaagtattagtttgtttgtgctgctataacaaaatacctgagactgagtaatttacaaagaacagaaatttgttttctcacagttctgcagtctgggaagtttaagatcaaggcaccagcattcggtgtctgatgagggctgctttcagcctctaggatggcaccctgtggctgcatcctttggaggggatgaatcctacatcctcacacatggaagggacagaagagcaagagagtgcttccttcaacttctagcctttttataaggctgttaatcccaggcatgaggacaaagccctcatgacttaattatctcccaaaggccacacctcttaatactgttgcaggggattacatttcaacatgggccaggtatgatggctcagacctctaatcacagcactttgggaggccgaggtgggcagatcacctgaggtcaggagttcaagaccagccttgccaacatggtaaaatcccatctctactaaaaatagaaaaattagccgggcacagtggtgcatgcctgtaatcccagctactcaggagactgagacaggggaattgcttgaacccaggaggcagagattgcagtgacccaagactgtgccattgcactccagcctgggtgacagagcgagactcagtctcaaaaaaaaaaaaaaagtttcaacatgaattttggaggggacaccatctcaaaccatagcaaaattcataaccataatactgaacagtaaatagtggggaaacagatgttttaagccaaggtgtcctttgatctgggcttaagataaatctggtggcaatgtggaagatgagttggaaagggacctctgtttaaggcagtgagatgtgtgcagaaatgtgtcacatgagtgataatgaggttgtgagctagggaagtgatggtaagagtgaagaggagggaagttagtcaagaaagaatttgaaggcagaattacaggcagggtttggcaagtgttcacctgttcttcctgagggaaaaagaagaatccgaaaaaaccccacagtcatttctaacttattgactagggtggggaataaagggagagcaagtttggaaaggaagattctgagtttggtgttggatatttagaatttcaagtactttgggaaatctaggttaaccatacatgagatcctaaacacagcatagtcataggtcttgcttatggtgttaagtagtgtaaacaatatatttaattatggatccccaagaagcacttaaaagtagtttataagttggaaatgtattcagatacacggcacagaaaatctgactaagtggctaaaagaaatagagtttatttttctcatatacaggaaagttggtgatgctggtattggttcaactgctcagtgatggcaagaccagttctctgggacttgccatcatggttataaatagctgatgcagctctagaaacataaccactttcttgtcaggtgcttctgtttgggtctgtttgggtagaactgggtcacgaggcctcctctggctggaaggttggctggaagagcgggaagaaaattgttgaattcacttaaatacatactttcccatcctattagacacaattcctcttttttaaaaacaaataatttgtaatgccttctttattatcctgaaataaacatcatagacaatctgcttgtgtacatttttaaataaatatattatcctaactgtaatataaaggaacaattaaaggaaaataatttataattatttcaaaatgtgaattctaaggcatgactgcactagaagacataatgaagaagtcagattcttgcacggtgaatgtgacagcaacatatgcaagtgatacaagggtatggtaatggtgtttccagtaccacaggcagcatattcatttgtgttttacttaaaagatgaccaattttgggtcaagttctgcacaaaacacagcatagtcttctcttgatatacaagatagttgtttcttgaaagagtcaacttgcatgaaaactgtgcaacaacaattttgtattcgtatacacaatagagttacattcaaggccaaggtaataggtttttcacatttggaaagctatttggaatgtaggagagttcttagtacacagattgtcccccacatagctgtctgtctagtgtccccggcctctgccaactagttaccagtagaatctccataccatggtgacaagtaaaagtgctccccccacatattcaaaatggcccctaggggcagcatcatccatattaaaaacaactggcttagattaatgggactggacactttgtactccaaacaaaatggaggttggttagcaaggaaaagggggaatggatattgaatagggaattaagtgtctaccaatagtaggaactgggttttccttatgtttgtatcttttcccaaattcttgcagaattccttgcatatagtgagttctcaataagctttcttgaatgactgaataaataactggaatgtaagctatgggaaatggaaacccagtattatatgagctttgaataaaggcaaaaatcttccttaagatacttaaagggctaactaccgtaaatccaggaatattgtcagaagttgggaagtgaactttggtgtgccagtgtctgtgctaggatttagcacttctggactttctgtctgttacacattctagactgaagactgagggttaaatttatatcagtgaatcctgttcaggaatggagggtttaggggaaatatttaagttttcatgtaagtagtatagaagaaaaagtaactgtcacaataaaagatcaataaatctcaggctttaaatcttagtctctctatcttttagcacattctctttccactgtgttcttttccacttctgtttgtctattcgctctggcatttttatcatagcctgagacattttcgaatgataatttttaggagaaatatttagaaacagaatcaaagggctttgttttgtttcctcgaaatataaacctattattagaatataattcacagtatgagaaatgtaggttttgcttgagtttgcttccagatttaagtagaaaagaaagaaaatgacattataaagaattttatctctttttttgtgaaaaagataatctgtaactatggattgtgaagacaatatatgaaaagcaaatctttttcaaacagtgctccaaagttgcctttgaatatataacttctgaattcaaaagcatgatacagcatgggtttttaaaaaaatagttgtttaacattttgaagggtataacatttgataactccatactttgaattcaagtgaaggaacaataacttcaaccttttgtttataagaataaggaacactaaaaaatgttgtgtagtttaagtttagacatttcaaatagtcctataattgcttgagagagcagtagagtttttttttcaattagtttattagtatttcagggattttaaatggaagaaaatcttgagtgtctttgtaaatgaattgcatcttttataggcacagatgtttttcgcagcattattttcatccccatggctgctttacaatatgtggcctatggagaaaatgacaagtaggtagatgatgagtaggggaaaatggtggaaggtacagcagcaataggaaggaagtattccccaaggtttgcctgaaaacatctactttgtgaagctccaacatttatggagcaaaatgccctagagtgctgcaacaggagacacaacttaccacccctcatacggaaggatgggagggagaaatggaaggggaaagggaaggagggagaattcctgtgatcttcactacccgctgtctccttagcacagagaattcatccattgccacatcagcacaaggacaacatatgaagttcctcaaaatttccaaataagccattacttattacctatacggttattccctaaaagtttcacactgaagtaaacaagtgtttttggtcatttcatgccaacaaactgatggcccttgatcatcatcctttgaactgactccaggtctagaatgaattttcctatgtatggtgaccctaagtctgtgtcttagaaaatatatatatatatatatatatatatatatatatatattttttttttttttttttttttttttttttttttctggactcactgcaaactctgcctccctggttcacaccattctcctgcctcagccttccgagtagctgggactacaggcgccctccaccacgcccagctaattttttgtatttttagtagagacagggtttcaccgtgttagccaggatggtctcgatatcctgactttgtgatccgcatgccttggactcccaaagtgctgggattacaggagtgagccaccgtgcccggccaggaaagaactttttaaggttgcccttgaataccggtcttgattaagttttattctgtctatatatttcattattttaattttataatacatttctatttcttgcttagaatttataaattatatatcagattatgatttctgtgttttaaaaatacctattatatcttatgctggttttcttaagtggaatgtgatatattaatatcttgttccatttttgttacttctccaaatatagacgattagtaatattctactatttattaatgaaaaactaccttagttggcctaatgtaactatctaaaaacaataataataaaattctgtagtgctgttagagagatatatgattatgcattccagccaggaattacatcagtaatttttagattatattccagggaaaaccaggttttgggtcaactaacacctatttattgttcacttatgttgaaggttctaggtgatttctcatatagctcattgttttgtgccttcaatcttagtaaatcttctaaagtgctaccgatatactcagggaaaactaactttgttaaaagaatatcttttaaattaacctacttttaaaaataagcattattatgtttgtggaatttgaaaatacagtctagttaaggtatttagaataacactcagtttctgtttcaaagtgattatatcattttagtatcaaaattaatttaattgaccatataaggagacattaagtattattataaaaatggcatgttatggcaaagtgtggtggctcacgcctgtaatcccagcactttgggaggctgatgggggtggatcacaaggtcaggagatcgagatcagcctggccaatatggtgaaaagctgtctctactgaaaatacaaaaattagctgagcatggtgacaggcacctgtaatctcagcttctcgggaggcataggcaggagaattgcttgaaaccagaaggtggagattgcagtgagctgagattgtgccattgcactccagcctgaacaagagtaaaactccatctccaaaaaaaaaaaaaaaaaggcatgttatttattaatacgagtgacatacatgcaaaaggatgtctgacttaggcaatgttattttctggacatattttttaaatagactgtgacctaagttctggtggtccctctagaaagggtaccattccctcttctctgcctgctgagccatttcctaagactgtcttcagatgttatgtcttctctagagcttttcagcattccttttattcttttttttgttctcatggtactctatgcatgagaatgtttgagtatatatatattattacagttatttgcctcttagactgcatttgggtattcctctttgagtttctatttcgtgtaaatgcatatagtttcctataaaaaacacaatttataatcctccaggaagtctgtgtaagtcagtcagtcaaattacctggttgattatagtttcaggtttatctgctgcctgggaatcaaaacacaggtcttgattaactttctataaagcaaggatatggactagggatcactaagctctcttttatctctacaatggtgtcattatatgattctaatccatcactagaaatgtattgtgaaatagttaattaatgtttgcagaatgcttagagaacttttaatgagaagtagatatttgtggttagtgctaatgaatagatgtcttatgaaccttttttttgcaccaacaacacattggaaaaatgtactttcaagaataaattgcaatctggtgaaatttttttattagttaacaaaatttagcttttaaaaacaagtatcagtatagtggctttagtggctttagaaaccaggaccctatgcatataaatagttgtaataaaaagggaagcagcaacagtgtatagttttcataatttttcaaaatagtttaaatatgatagcaactttttactcttacagcttagttgtgaaggaggcaaggccagtactcttatactctgggaagctaagacctagagagattaaatgctcatttatttcttaaataaaaatgtattgagtgcctgtatttgagtataacaattgaaggtgcagtggtgaataatttaccctacttgactttgatagtaagggagacaggtttataaacaaacatattagctgatagcatagttaattatggtagaaacacagaagatggtgcaaataactctggggtgttgtttagtgagcctttacagaaaaggtagtttttaaagcattttcattaaactgtaagtggaggcatttgccagatgaaggggaggaggtgaggagaagggtctttcaataaaagagaatgaacatatgtaaagacccagagttatgaaagagcctgtgcgtttgaagaacagcgtgaagttcaatgcagctagagcaatattgtccaatataaatatgaacacaaatgtgcaatttaaatttttctaatagccatagtacagagtaaaaagagacaggtaaaatcaataataacacattttatttaacccaatttatctgaaatatttatttatttttcaacttaagtcattaaaatcaaatcaggtgaatattttacacttacaaaacatttcaatttgtcttccttccttcctttcttttcttttctttctttctttttctttacttttttttttttttttagggactggatcttgctatattgcccaggctggtcttcctgcctcagtctcccaaagtgctgggattacaggcatgagccactgccctcagcctaagacatctcagtttggactcaacacatttcaagggctcaatatatagaagcttagcaatgcatgtatatgtatgtgtgtgtcggagagagaaagagagtgagaatgaaaatctgtgtgctctagagggggaggaggttagataaggttgaagtagttgttggagtcatatttttaaaggctctgcatgctggcttattttagaattttttcttataatttagtagtttatgattgtgcttctcatattatctgtggtgaaggaacaattttgaaaattttgcatttgttatagactaatgctttcgcaaaataataataaattagaaaggtgaaagtaaaaagacatacaaagagaagcaccattttttaatcattaaagttgacaagatgttgtcttagtctattttgtgctgctataacggaataccatggactggatagtttataactaacagaaattaattggtttacaattctagagcctagaaagtccaagattgaggggccacatctggtgagggccttttagctgcatcaaaactttgcaaaaggcatcacatagtggaagggcaagagagggagagagaaaaagcaagagggggtaaactcactcccatgataaataacccattccctcaataaaggcatttgtccattcacgagggcaaatccatcatgatctaaacatctcttaaaggtcctaccttccaagaccattacaaaggcaattaaatttcaacatgaatttggagggacaaaagttaaacccatagtattcctcctgtcatgtttttcttacatacaaaacacatttatttcatcccaatagctccaaagtcttaattccttccagcaccaactcaaaagtccgaagtcttgtctaaatcagatatgggtgagacataacacaattcattctgaggcaaattcccctctagctgtgagcctgtgaaattatacaagttatctatttccacaatacaatggtgggacaggtataggatagacattcccattccaaaatggataaataggcaaggaaggggtaactggttccaagtaagtccaaaacccaatggggacaacaacagtaaatcttaagcctcagaaataattttctttgactccatgctgccctgcttcctggacacactggggaaggggttgagcccccaaggacttggagagccctgcacctatggctttgctggaacgttggagtcttatgcttacagctctcctgggctggctttgtgtgctggtatctacagttcaggagtctcaggtgtggttctgcccctgcagcttcactagacattgctttagtggggactgtttgtggcagctctgctcctgcagcagatttctacctggatccccaggctgtctgatacattctttaaaatctaggtgaaggtagccatgcctccacagcttgtgaactctgtgtgcctgcagaattggcaccgtgtggataccaccaggacttactgcttgtgcactcaggagcagaggccttagctgcacatgtgcctgctcaagctatggctggagcagcttaagggcactgcaccagaatgtggggaacagacatttgggtaggtgaggtgcagggcagttaattctgaggtcccctgggtgcctctttggaaactttgccctcaagattctagcttgcctcagagatccctgaagtgcctttgcggtcattttcttattgtcttgatgaatagcacctggctctttactagccatacaaacctttctagcaaatggttgtgtggccacatcttttgtttgcactcctaagcacacatttttattctttacatggccaggctgtgaattttcataatttttatgttctatttccccttaaattatgaatactgtctttaaattatttctttcccctcacattctattatatacatttaaaagaagccacacagctccttcagtattttgcttagaaatttcttccatcagatattctagtttatcactcttaaattctgccttctgttaaagccctcaggcatggacacactttagccaagttttttgccacttaataacaaggatagcctttactacagtttccaatacgttgttcttcatttccatctgagacctcatcagaattgcctgtactgtccatatttctgtcagcattctggtcatgaatctctaagaagaatcactcaagtaatctctaagaagttcccgactttctctctggctcatctgctcttctgagccctttccagaacttcccttaatactgcattcattgtaatctaggcttttcctaggctgctcttccaaattcttccggcctctccccgttacccaatttcaaagctgcgttcacatttttcgggtatttgttataacaacccacctctctggtaccaatttttgtcttagttgtgtgagtgtgtgtgtgtgtgtgtgtgtgtgctgctttaacagaataccacagacggagtaatttataaagaatgaaaatttattagctcgtggttctgcaggctaaacagtccaagaatgaggggccacatctggtgagggtcttcttgccacatcataacatggcagaaggcatcgcacagaagaagggcaaagaggggatgagagagatcaaaggagacacaaaccccttcctgcaataaacattagtttattcataaaggtggagccctcatgtcctgaatacattttgaaagtccaaccttataataccgtcacaagcgcaattacatttcaacatgagttttgaaggggacaaacattcaaacaatagcagacatatagtttataaaaaagtgtctaaaccagtgctatccaatagaactttctgtcatgataggaatgttctgtctgtgctgcttaatataatagccactagccacacgtatctattgagtacttgaaatgtggctagtgtgactgagaaaataaatctttagtttaatttaattttagttaatttaaattgaagtgaccatatgagacaattgattactatattggacagcattgaatacatttactcataatctctgtatttacctattgtgcattagtaaaaaacagtttgtggactggtatggcccacaaacccatgctttgagtagcactgtttaaagcatggactctagagctagaaagcctttgtgtatctttggcaaactgcttaatcgcttggtgcctcagtttcctcatttgtaaaataaaggtaataataaactaccttatagagttgttgtgaggattaaatgcattaatgagtgtagcatacttagtacaaggtctgacacacagcatgcactatataaatgcttcctgttattgttattattatttattatgtaggtggtggatatcaaacagttaattggtaacaaagcccagtctttttattaattctctgctttttgcagtagcttagactttttccttttaaaaacataccacagtttgtggcatctagtggcttccaataaataccttttgaacataagcataaagtacttttcaagcacagatgaagaagcaattattgttctgaggtggggggggggttggtaaaattatcaaaaacagatgacagctgagaaggcctcaatggaggagtctgacaggcaaagaggagagaacacacctggtggagggagcaaggacacccatttggattatactctatttaggagactatacagcaggtaacactgacttagccctatcactgctaccaccacttctttctctccttcccagctcttttcttgatttatccttttagcatattttaaacaggattaataggtaacacgtgattctacagttttaagggaggtcaatcgttgcctctttacttgttcattcctcagagtaacagtgcctgaatttgatggtggatgttgggcagtggttgggaagggaaggggaatgctgcttgaaaagcaatccctgggttatgggcagatagctgtgagattcttttcccctaaaacataatgtttcttatttatgtagattatcttaacaagaaaaccaactggaaaaaaaaatgaaattccttatcttcgcatttttcggtggtgttcaccttttatccctgtgctctgggaaagctatatgcaagaatggcatctctaagaggacttttgaagaaataaaagaagaaatagccagctgtggagatgttgctaaagcaatcatcaacctagctgtttatggtaaagcccagaacagatcctatgagcgattggcacttctggttgatactgttggacccagactgagtggctccaagaacctagaaaaagccatccaaattatgtaccaaaacctgcagcaagatgggctggagaaagttcacctggagccagtgagaataccccactgggagaggggagaagaatcagctgtgatgctggagccaagaattcataagatagccatcctgggtcttggcagcagcattgggactcctccagaaggtattgtttgtcttttcagtttgatttgtattttataaaactaatgtcccttggtgtaattgagtacaatatgcatgattcatattataatttggataatttcctattccattggcttaatgagttctctacccttttttgtcctcccattttttacttctgtttcttttgtgaaagggaactgatcatgttggatcgctttttaaatgtagaatctgtagctactggtccatgatacttaccagccctatcactttgtaattgctatctagttaaacattagcatggttctatagataattgaaatatacataaacaggatacaaaaacgatgacttcttccaagtggcctcagtgtgaataattttttagaattaatgaaatagagaatagaactttgcactctgaattgatttaattatttttatagaactgaggcttctcctgcaaggaattatccaaggttgagttctacctttacttataagcaccctggatcagctttatcagataatatacagtaaatgcccagatcagggatgtatagccagtcatcagggagctatcagttagccttgaatatatccatgggctaatttccggtggcagaagaacgagtttctattcttttgacttttttgaatgccaagagaaaggcctagtgaagtacattgtcagtttaaaacattatttattgagatataattcacatactatgatgttcatgcatttagaatgtacaagcgatttttaatatattcacagagttgtgcagccaccacaatctaattatagaacatcttcatcaccacaaaaagaaactctgtgactattagctgtcattctccagtctacctatatcccagccctaggaaaccactaatctgctttctgtctttatggatttgcttattctgggcattttacatgaatggaataataaattatgtgatctttcatgaattctttttttcatgtagcatactgttttccaggttcatctatgttgtcacatgtttcagtatttcattctttttattgctcaataatattccattttatggatgtaccacatttttatttatccatgcatcagttgatggacattgagattgttttcaccttttagatattatgaatagtgctgctatgaacattcatgcacaagtttttcatgtgaacatttgttttcatttctcttgggcatataccaagaagtagaattgctgggtcatataccagctctatgtttaactttatgaggtattgccaaactgttttctgaagtggctgcacagttttatgtacccactgacaatgtattataatttttccatatgcttgccaacacttgttattatctgtcttcttggttatagctattctagtgggtgtggagtggtatctcattgtggttttgatttgcatttccctaatgacaagtgatgttgagcatccttccatgttcttactcgccatttgtttatcttctttggagaaatgtgtatccaaattcattgcccagtttttaatcggactatgagatttttattatagagttttaaaagcttttttaatgtattgtatatacaagtcccttttcatatatttgatttactaatgttctctcccattctgaggactgtcttttctttttttttgatggcaatatttgctacagaaatatttaatttttgattagtccaactaatttattttatttcttttgttgcctgtgcttttggtatcatatcaaaccattgcctacaccatggtcacaaacatttactactactactgtaatgtatctaggtatgtatatctttactctcatctcatattttcttctaagaattttatggctgccattcttacatttatatctgtgaattaattgtgttaatttttgtatatggtataagataaggcttcagctttcttcttttgaatgtggtcattcagttgtctcagcttcatttgttgaaaagactattctttctcctttaattcggtgcattacattaattgattttcaaatgttaaacaaaccttgcattactgggataaaccccacttgattacaatacataatcttttttatatggtgctgaattcagtttggtggtattttgcttaatattttgcatttacatccatagggatattggcttgtagtttcattttcttataatgtcttttttttttttttttttttttttttttttgtatcagagtaagactggcctcatgaaatcagtggcaaagtgtcacctcaccttccattctttggaagagattacaactgactgctattaattctttaaatttctggtagaattcaccagtgaagcaatctcattcacgcttttctttgtgggaagatttttaattattaattcagtttctttacttgtctaatcagattttcagtttcttcttgagtcagttttagtagtttgtgtcttttgagaaatgtatctgttttatctaagtcatgtaatttgttggtatacagttatttatagtatcttattataatttttttatgtttgtaaggatggggtctaaatcactgctgtcacttgcttttgggcagaacaactgtttagatttttctagcaacaaattctctgagcctttattcatctttatctctttgcttaaccttcagttttgaaagatagttttactagacatgagattcttagttgaggggtttgtttttcttttctttttttcttttctttctttcttttttttttattttcagcactttgaatacattatcgatcccattgccttctggactccattgtttctttttctttcttccttttttttttttgagatggagtttcactcttgttgcctaggctggagtgcaatggcacaatctcagctcactgcaacctccatttccccagttcaagtgattctcctgcctcagcctcccaagtagctgggattacaggtgcacaccaccatgcccagctaattttttgtatttttagtagagatgcagtttcaccattttggacaggcttgtctcaaactcctggattcaggtgatccacctgcctaggcttcccaaagtgatgggattacaggcttgagccaccatgcccggcctggactccattgttttgatgagatgtcagctgttacagttttggaggtttccttgtatgtgctgagtcatgtcttctttattgctttcaaggttttctttttcttttgatttttattattttgactctaatgtatctaggtatatatatctttattctcatcttacttggaggttgttgattttcttgcatgtgtagattgaagtttttcatcaaatttgagaagttttcagctatcattttcacaaattctttttcttcctttttttctttttcctctccttctggtacttccatttacagtgtgttggtgatttaatgatgtcccatatttctcttatgctctgctcatttttctttattctttattttctttgttcttcagattgtatgacctctatcaatctgtcatcaagcttactgattctttcttctattagcttaaagctactattgagcctctatactgaatttgtctttttagttactatacatttaaactccagaacttctctttggtctttttaaaaaataatttctgtgtctttattgatattttttatttgatgagatgttgtcatcatatctgcctttagttctttaagtatggtttcttttagttccttgaatatttcaataatagcttctttgaagtgtttgctatatcctacatctgggccccctaaaagacagtttctactgcctacttcttttttttcatgtgtatgggttgtactttattgtatctttttatgccatagttttaaaaacagaaaacctgaatatttaaaataataatttaaaataatattttatggcaactctggatgctgacttgtcttcctccctttcccccatccatttacctggtcattcatttgtttaatcgcttgactgtactaactctgtgatgtctatttctcctacactgttcagcttctgatgttcctgtttagattgtttttctgttttattttttgtttttcttttggctgggttccctatgagtcacccgtaggtctgcataagccacttattggtcaaaggttatgcttaggttcctttagacagttatatttttactctttgccatttgatgtttttatggcttggagtctgttattacaacttaagaagtttgttttttcccccaactttggccaaggccaaatgccttggaagttccttttctaatcacttctgagagggtgcggccttgagcatgcacacagccttccagattaccagaatgcaaataattttatttttaagcgtggcttaatagtattttctccagggtcagaatagcttattttttagccagtgtttgctcagaggttgtccttaaacaccttgagtgagtgagatttctgccctttgttgacggatctgtgtgcagcttgggaaatgttttcaagtctgacccatgtgttgttttgattgttcctgagtaggtatgacctaggacatgtgtgtagcttttcaacccccagggtttactgggatcccaggaaggcccttcttggttgtttctttccttggttctttctgttaaagctatggttgttctgccattttgcttgttgctagcagtatcgtgaagctaccagcacccccttaattgttcttcaccaagctctccattattttcagcaacacccttaagtagggaattctccgttctctgcactaaatgaagtcactaacatcaataagaactatggagctcttcatccttatggcttctctcttcccccaggagaacattcgtgctactgcaagggagctagatgcagtgatagtggcacctcccagtgtcacccagaatgatatccctagtggatgataagaagggaggaggtagttctcagccttgttggcttgcagcttccagtatgggaccacctcctatgagtgagctgagaaaggggtgatcagagtcttagtattcttgatggctacttagggtagagtttccaccctatgagtaggacttgggtagaggaatggcacctcagttctcttggcattgcttgactagaacagaggttctaccacaaggtaatggggttggggaatgagaaacactggtagtctgtccttccaaaggtgaaactgtagccctaaactgagaattgggtggagagaaagctcttacgttcttgtctgcacttggtcagaatacggtacctgtagtagagtttctgtaacatggggctgggggtgggagaggaaagcagatcatgacccagatgccacagactcttactgttctcatcaagacttggtaaattttcttggatgaatgttgtcctttgctgtatgcccttaggggagttttgagagacattaaattattttttaaataatttttcccactaaatattttgtggggtgaagatctgctgagttactcatgctgccatgctggaagaatcactgggatagccagttttgatctctctaaggctgcatgaataggtggtagaattctccaaggtattagggagctccttagcttgggttctatagtgttagtcagttttcttcagttgccttctgttaaatgctaatctatgttagacaccaacttaaatcctcctttttaagctctctcaattgtccagttatctgaaaaggattagcactttttttcccagatgagagaaccagactccaagaggttatgtaatttaccaagggttgcacaactggtaagaggccttgtttgggcatgaacaactgtcaaactccagagtttgtgcttttagtcattagactatattgcctcacatacaaatattttaatgttgtttcatttataagattactatttttagccatctagctgaagcagatctgtttcaaaagccgttgatacctgtactgtgacagcagaatatattggtttttgtgtgtttttttaaagaaagttttcttattcccatttctttctcattgtcatttctgattctacaactgggcctcctctttcctggctacctgcctggtattgaaaactaagccaagttactgattgctcctgagaccttcaaaacccagaggatatgaattttactcaccggaatctattctgttttccaagactcactttcaccccactcctcgttccatggggctcaaagtagataaacagttgtctggcaactggactattttaagctctgaagagactggagagttaggctggaccaggtgtggaaaagtcccacaggagacagtgtaaagttggcgtaacaggatctctaatccaggcagagtggtgcagagcttatcttctagcctctctctcaggaaacctgtcttctcactttggcttaccactaactagttgtgtgaccttggttgccatttaatcatcatggccttgatttcgtgacctgtgaaatgagagatggttggaatgttgaatctgtaaggtctcctctagattggaaagggtaatttttatgagactccataagggatcactgaagctagaatttacaggagctggattctgccaactatatgtgatggagtagattctttgtttaaccagattttttaactttttaattctagacttgaatattacagtatgtatgttagtttatgcactcttctcaacttcagtattacagtaggtatgttagtttattcacatggcaggattgagagctctgcaagttatctgtggagagtttgaagaaggcagatatacaagcaggccaagtccgaagagatgaaggacaaacttacaagacaggagaaagcacaatctccaatcagtcctgagataacatagcatacatcagatttgaatggaccaagtaaaagaatgagaatcaacagtcacatctgggacaggctgacatatgttcaagaaagaggaacttgggcagactatgcggttctttcccagcagacataactctgggtcttcatggtttatggtctctgagcccaacacagcaggtcattgagtatttattaatcctcattggagactgacatctctaccgaaatacagggctttcttaaaattttaggattgtatgtttttattatgtttggtgtatgttttattatgtttgtatgccatattatgttatgttttattgtatgttttatattagttagggggctcctggcggcctggactgagtcttatccatttctatattctcaacatctagcatcatactcagtaaatagttactcatttagtttactcatttatttgagaaacagtggatttttaaggtagttctttccttggggtattattcacttgtactaaaataaggccttcttctacattgtattagtctgttctcatgctgctatgaagtaatactaagacaggataatttatagacgaaagaggtttaattgaatcacagttccacatggctggggaggcctcaggaaagttacaatcatggcggaagacactccttcacagggcggaaggagagaatgagtggcaagcgaaggggaaagatggttatacaaccatcagatcttgtgagaattcactcactatcacaagaacagcatgggggttactgccccccatgattcagttacatcccactgagtccctcaataagatttgggtgggacacagccaagccatatacataatgaatgatgatactgttgagccatcatcatttactcagaatttccctgattataaaattaatacttgcttattatagaaagcatgtacataaatataaaaataataaaaatcacctgtattggtccattttcacgctgcttataaagacatacccaagactgggcaatttacaaaagaaagaggtttattagacttacagttccacgtggcttgagaggcctcacaatcgtggcagaaagtgaaaggcatatctcacatggtggcagacaagagaagagagcttgtgcagggaactcccctttttaaaaccatgagatcttgtgagacttattcactatcatgagaacagcatgggaaggacctgcccccatgattcaattacctcccactgggtccttcccacaacatgtggaaattcaagatcagagttgggttgggacatagtcaaactatatcattctgacttggcccctccaaaatctatgtcctcacatttcaaaaccaatcatgctttcccaacagtttgccaaaatcttaactcatttcagcattaactcaaaagtccacagtccaaagtctcatccgagacaaggcaagtcctgtccacttataagcctgcaaaatcaaaagcaagctagttacttcctagatacaatgggggtacaggcattgggtaaatacagccattccttgtgggagaaattggccaaaacaaaggggctacaggtcccatgcaagtccaaaatccagcagggcagccaaatcttaaagcttcaaaatgatctcctttaactccatgtctcacatctaggtcatgccaatgcaaaatgtgggttgccacggtcttgggcagctccatccttccaggctgctttcatgggctggtcttgagtgtctgcagtttttccaggtgcacggtgcaagctgttggtggatctatcattctggggtcttgaggacagtggccctcttctcacagctccactacgtggtgccacagtagggactctgtgtgggggctctgatcctacttttcccttctgcactgccctaggggaggttctccatgagagcaatgcccctacagcaaacttctacctggacatccagatgtttccatacatcctctgaaatctaggtggaggttcccaaaccccaattcttgactcctgtgcactggcaggctcaacatcatgtggaagatgccaaggcgtgaggcttgtgccctctgaagccgtggttcagattctacattggcccctttcagccacaactagagcgactggaacgcaggtcaccaattccctagatggcacacagtatgaggatcctgggcccagcccatgaaaccactttttcctcctaggccttcaggcctgtaatgggaggagctgcctgaagacctctgacatgccctggagacattttccccattgtcttggggattaacattcagctcctcattatttatgcaaatttcttcagccagcttggatttctcctcagaaaatgggattctctttactatcacattgtcaggctgcaaattttccgaacttttatgctctgcttcccttataaaactgaatgcctttaacagcacccaagtcacatcttgaatgctttgctgcttagaaatttcttctgccagataccctaaatcatctctctcaagttcaaagttccacaaattgctagggtgggggtaaaatgccaccactctctttgctaaaacacagcaagaatcacctttgctccatttcccaacaagttcctcatctccatctgagaacacctcagcctgcacttcattgtccatattattatgagcattttggtcaaagccatttcaacaagtctccagggagttccacactttcccacattttcctgtcttcttctgagcccttcatactattccaacctctgcctgttacccagttccaaagttgcttccacatttttgggtatcttttcagcagcgccccagtctactggtaccaatttactgtattagtccatttttgtgcttctgatgaagacatacccaaaactgggcaatttacaaaagaaagagatttactagacttacagttccacatggctggggaagtctcacaatcatggtggaaggtgaaaggcatttctcacacggtggcagacaagagaagagaacttgtgcaggaaattcccccttttaaaacgatgagatcttgtgagactttttcactaccaccagaagagcacaggaagccctgcccccatgattcaattacctctcaccagatccctcccacaacacatggaaattcaagatgaaatttgggtggggacacagccaaaccatataatcacctatgatattttcctctagagagtcattgctatcatttctatttttccttttgatatttctatatgcatatgtattttattttataaacttgtgttcacactgcatatagtttgtgtccttttatcttatatatcatgaacatttaccacatactagtaaatatctttttaaataagttttaatggctaccaaatttaaatatgcaataattaatataatgccttgttattggaaactagattattttcttatttttttctcttcttttaaatagcatgggtataaaatcttttaatgtagaaagaagtatagacttttaaaggaaattttatgtttttaataaatgacatataaaggaggaatcattggtatattctaggaagttgtaggagagtagaaacaattagttttgaaactgcttgtatagatgtaaaaaatgccaataaagttcttagaagctgttttattttttagtggttttagttgtttaaaaatgttaacacaatagatatgtaaacattatatataatgtacattttaatgatacaacgtaaatatatattttaattactttaaattattaatgtacatattgatacatttatattcttgatatattttgttaaattgttttccagattgtacacacctattctcttattagcagtgtatcttcaaaaccctgcaccttcacctgcatgggtattttttcctaatctttgccaatttgatgaaccaaaagtgatatttccctattattttactttgcatacctttgcttattgttcaagttaatattttcatatgtttactggaagcatatttttcttctttaaattatttgagcatatctcttgcctatttttctactggtgctttaatgatattctaattgatgaataataattcattattaatgaattattttaataaatcaattgtaattgattgtcctattttattcaaattgagtgttttaaaagatattaagatggtttgcattgatatatcaccttctttttcattttttcttaaaagcatatttctttctgtattttgaggatgacttagaatgtagttaatagactgcaaaatagcaaagttgactaatttccactccctctcccctatcaaagtgctctaaggaacagttctttaggttagcttacacatactttggaacatcagtgtcattattcgaagattggtgaatgccatgcttttgaatatgtaccagcaaacttaaggtctcagtgtagctagacttggatttttgagctgtgtatatggattggtacttctgctggtttatgtcaaactgtgtgtaccttatgacttttccttttgggaataatataggagtgagaggaaggacaggtaaagagcactagattgagctcaatgtgcagagttgactggatagttaatgttgagctgtggagattagcatctcctctaactggtttaaccagctatgaatatcttacaggattttaaatggtttacagaatcactgggtaagctaatgatgcagattttaaattgagcttctcaggaatgaatttgagaataattctgtagaaccaggctaccatgattcctgttgcctttcctagattaagcaatggcctttgtcagaaaactgccacagaaaatctagagattttcacaatggtgcttgtctctgaaacagcagaaaacagtctctgtctaattcctgctttccagatcttgttcaagtgcaaaaaattggtgacacttaaattacttctagaaccctaactgtagaaaatcccaggaatgtagttcttaggtgttcagtctttgtgactcagaaaagcacatttgaaggaccttgaatggatgttgaatgccaactctccatatctaacacaatactcctttcattatgtcccttaatcaacaatatgatatggacttttttgcataaataaacaagaacagattgccattggttatatagtacaagtaacactaccaatagcattgtggtcctctgtggttataggattagaatgaatttaataggacaaaaaggaatatagagcataatcatgaaaggaggtatctccaagggcattctgatggattgaagggaaattgctttaggctgtttgtcacatttgccatataagttaaagtaggtttggctgggtgcggtggctcacgcttttaatctcagtgctttgggaggccgaggcagatggatcacctgaggttaggagtttgagaccagcccgagcaacgtagtgaaactccctcactactaaaaactacaaaaattgccaggtgcggtggctcacacctgtaatcccagcactttgggaggccgaggcaggtggatcacgaggtcaggagatcaagaccatcctggctagtgtggtgaaacccagtctctactaaaaatacaaaaaattagccaggcgttgtggcaggtgcctgtagtcccagctactcaggaggctaaggcaggagaattgcttgaacctgggaggtggagtttgcagtgagcctagattgtgccactgcactccagcctgggcggcagagcaagactccatctcaaaaaaaaaaaaagttaaagtaggttctccttcattttttataccctttccctttatctgttttgtatgcttctctttcctaggccatatatatatatatttctggtcttactctgttgcccaggctggagtgcagcagcacaatcatggttcactgcagcctgagcctcccaggctcaagcagtcctcccatctccatctctcaagtacctgggcccacaggtgcatgccaccacacctggctaatttttcgattttttttaataaagatgaggtcttactatgttgcccaggctggtcttgaactcgaactcccagctcaagtgatcttcctgacttggcctctcaaagtgctgggattacaagcataagccaccatgcccagcccctagacctcatcttaaagactggcatttcaaaggtttctatcttttgtttataaacattctccttaagtgatatgatgcagttccatggccgtaagtaccaccttgtgcttcagccacatggggtctatttgcctttccctcaacatgtgagtaccccttgccttaaaagctgcttcttggacctctgtctaacctaaccctaaccctgaccttaacccaactcaacccctctctgcttggagaatttatactagtttttaaagactcatttttttctttgaagtctttctggaaccccaacctaaataaatttaattgttctttcatctctacttttgtagcactgtctgttttatacaatggtcagattttattgtagttgagtgttcacatggttatctcctctgaaaaactgaccttctccatggtaaaagccacaccttatttatctttccatctcctgtagcactaggcccagggcctggtatgtcatagatacatattagatatctgcatgttaaatcatgagtggattgtgaaaggtcacaaatttaaaaaggatatttgaaaactcattcatactaaaacaagcttcattttagcactgtgtgattctcataggtcttttgtgtccatgtcatatccaaataacaagaaattttggttggcatctcagtgaaagcagatgagaaagagaaggataaataaacatcaatcaaatggtgattaggttgttcaccatggcctattctttctggaaacttaagcagcacagataaagtctgggaagctacagcctaaacttatttccaaactcttgtctcataggaacctaaaatagccttcctgcatacttcaagcacatctagcaaaagaaggctttctatagccaataagttcagtccatttgttagtgagatgctaatttacctgcaaagtcccatcatcagataagtaattatttgcacatgacctcatctcctcttttgatctcatcaaggaaacagcattttcagtattttttttttagggcttaatctttgtctgatatctaattgcagaatgagcagaagtgctctagacagcctgtatccacagatgatactttaaaattggcggtatgggatcagttgacggatctgactacaaagtgtcagaggttgcaaattccttctctctgtatcaaattagggatggaaatgaggaagtagggggccaaggaatttacattgatcaagtgtttatcatattctagtctagtcattgtgcagattcttttatgtattttgtctgtgactataggggttgttcccactttacaaatgataagctctgggaggttcatcatcttgtccaaggtcacacagctaatacatggcagggtcttgccccaacatcatgccttcccagtagccttccctcttcaccttgcctcatggtagatctttttgcccatatcttttaagtatttccacttccctcttgactgtttctgtaagaataagcacacctatctcctatgcacacaaacatgacctaagaagcataaattaaaagacaaaaatattgctgaatttgattgcgtcagaacttagaatttctgttccgtgaaggataccatgaacaaagccattagaaggcaaaatgagagaagatattagcactgtctaaaatgttaaggaataaatatgtgggcctagagaatactggaaatcaacatgaagaaggcagtagtcctaatagaaaaatgggtaaaagttctgaattggcaacttaaagaagaggaagcctaaaagctagcaagtatgtaaagaaatgttcaactcattagtaataagtacaatgcaaattttaaaaacaatgagatcactttgtagcagggatgtattaataaaatgtgttggcagggctgtgaagacgtaggcaccctcatgcactgattggtgggtgtgaagcatggtgctgccattctggagaacaatctctagccaaattaaatatattttcatattctatgacccagtaattcacttttctggtatatttcccagagaaattattgtacagacccctaaaggtacatattcaaggatgattattatagcagtatttatgggggcaagatctatgtgggagagtggacatataaaatatgatggatggccccagggactatgacaaaacagttggaagcaatagactaatgtatgtattgcaacatgaatggctcttataaacataaagctgggctttaaaaaagtaaaaaatagaatgatatataatacaattgcatatgtatacatacaattttacatgcacacagaataatattttatattttgcaagaagatatacaatcaaaaaacatcttagaagagttttctacttaggacattgtgggagggagtgagaaatggggataaaagagaacaaatagttttttaaaagcaaataggacaaagagacttgcgatgaataggctaatgattttgtaccatgaattgaggcacataattaactgaacactctgaatttgatttttttttttttttttgagacagggtctcactctgtcaccctggctggagtgcagtggcatgatcttggctcactgcaacctctgactcatgggttaaaccaattctcatgcctcagcctcccgagtagctgggattacaggcgtacaccacaacgcccagctattttttgtattttttggtagagatggggttttgccatgttggccaggctggtctcgaactcccgacatcaggtgatccacccaccttgacctcccaaagtgctgggattaaatgtgtgagccaccatgctggcctgaatctgatcttaaaaacaaaaatccactcacctgtgaggcatgaggttaagatagatatatggataatttattacttacttcaagcataaaggaggccacttctcttttactctttcaatgcttatccagttcccttttcactcactattttatgacattcaattagatttttgcttttgattttatataatgtaaatacaatgtaaattattcactttttaaaaatatgtttttggtttttatgtcatacatctttgccattgttttcttcttcatttctaagcttttaagggcagggatgatatttcttttcacttgttattatatagtccctagcatggtgataatcccagtgttcaattttatgaaaaatcttctaggaggaggttttcctttttaaattctaaaagtgtggataatgttcctaggagagtagatgactaaataatgtaggctgatagcatcaggtatcctttttaataaacaccccattccatcttaacacctcctctctgcctcctctctgccttctctttagcaaatctgtctgccttttttcctgatagaaagtatcattggttaataactgtagattcttgataattgttattgtgaatgaattgcaaaatcgtggtcaataattaataggttataataagtattgagcttaatcaagtagaagtagtaaatttagatatttcttcttgatagttatgattccatctctttgtctttgtgtttattttttcagcttctctctgtgtgtctttttctatatctctctactaatcacctctttctttctctttatctccctctccctttctttctctttgtctctttctttatttttgactgtgtctctttgtttttatctctttttttcccctctcctagtttctggttcatggcctcaccaacagtgtagtccaaggctgatgcatttgcagctatgtcaggttagtgctctagaattaattagagcttctatcttttttttgagtctgtaaaagctttctttgacaggctcattgtagtcttggaattatagtcacttgaatcaagctggtgagtacatattttgtagcttcataacagtaaagaaacattttgtgatgcatttcacattgaaagtggctccaaaagagtcagtgccattttgatggcacttgggaaaatgcatcagtaatatcatttagctgaaggcactttgatttctccaggagagctgaatagaccaaggccttgtgagactctttacagtcctgattttcttttccttgaaaaatttcatggcaatttccaggaagtttcagaactttatgtcatcaaactgaaactttttttcttagaaaaacattaagatttttcttctttagtagtagatggcttaaaggttttaggtctgctattggtaaatgcattggatgttcaaagcttgattgactaagtgggtaataaataaaccactgggaccagatgacatcaacccagtatttttgaagaaagtagaaggtaatattgtcaaaacttggttcaattatttttaacccttgttagttggcactgaacacaagaactatcagatttttttgagcttacccttcataagaattatcctacgaagacttaagcagtacattttgttggtgattattatctctttatttcatccttgtattaatcaaggttctcaaaagaaacagaagcatacacacacacacacacacacacacacacacatggcctctttggaggccaagaagtctcatgatttaccatctaccagatggagacccaggaaagccagtggtgtagtttgaaggactgagagctggagaaccaatagtatacattccagtctgggtgtgaggacctgagaaccaaaaaatgctgagggcaggacaagattgatgtcccagttcaaatgatcaggcagagttattccagccttcttttgcctttctgctctattcagcctcttaatggttggatgatgttaacccacattggggagggccatttgctttattcagtccaccaattcaaatgctggatggaataagagaaagactgaagacagagtccagatttgagggatgaatggtttgatttaatggcttcagaagtggagaagcaaaaatgttaaagatctattaataccttttgtatatgagagatgaaggaattggaggaatcaaagattataaagctttcaagtttggattggtgagaaaaccataatggtattagagagaaaaagaagagggttgtggaggtaagttagctgaagccagtaatgagtttggttttcaatacactgaaccttttgaggttgattccataaaaggtagtcatgtcctcatatgcaatgctcccaagtgtcacagagtgataacaatggaccagtgtagtcactgatcccacccatgtagcatttcttattttcttcagttaaattctacaaactcatcagtatctcctactaatactgccacaacagtgatctctgcttagttatctgtcaggtcaacatactgtgagcctgattatggcaagggctgcctgtaatctgtctcccaagtcctgaagatagcacctgccacttggtaggtgatcagtaattggttgttgcattggcatccacagtgtgcccaggtcaaggtgatgatgatacacagatgagtcaaatgaggagatagcactggtgtaatgtgggaacatggagaagaggaggagtgataattctgtttgggggttgaacaagccttcaaagagatgtgacattgaaggataaaggatttactggggctaaggagggaaaaaagatatttttaggacaggaaactagaagagcaaaggcatgcaggtgtgagagtataagatgtgtttgctcaatgactggaggagcaagttcacagagaggagaaataagtggatggtgctagaactggaaacgtatgcaggtggactatagaaaaccttgctaaggctcttatgtgctctcacacttcttaggacagaaattatttttagagtgaggaaagaaggggagggaggttgttagatggtaatttaatctggtatcttttagtagaagcacagagaactgggaatgaagagttttgagttttaatttttgttgctaactaatgtgattaggacaaagttataaaaattctctgaactatctagggttagtttctgttatttataaatactattattagtagtataatttttatttgatacaagaattcctaaaagttttttttttcaggaaaatatctagtttttttaattttaaaaaatctaataaaccaaacaacagttcatactcttttggtcacataggcatcaatgaaataatttctattctgactgtcatggagaatcattagcctgttacctgctaatgttccctttgtcttttacactgtggttttttgtaaactatgtcagtcttactatgattcaaaggacattaaagcaaatggggtgtttagtgacaaaagtatttacaaaaagcttttttttttttaagttcacactgccgtattgtactctcctcaaccttacttttaagtacattttctatacttaatttgggagaaattaccataaaacatttagtgctttgttttctgatatggtttggttttgtcccttagttcatggaattgaacatttgccttcagactgtatttatgtattactttcatctgaagaacatttattaagcacctgtttgtgggcattgccagtgatataactggtctgaacaaaaatatagctaatgatgtgcaagcagaaagtgtaagtttcctgcagccttttaaaataatattttactgatcataaaagcaatgtgcttagaatgtaatatatgtagaactttgaaaaataaagaaaagcacaattaggaaaataaaattccatgaaattctactgcctgaagataagagctgtgaatattttggtctgtttgcatgctctggtttttttccctatgcatttaaatatttatgtacatttacaatatcttgtgaatgcttcccctcttttaaatgagagtatagtgtgattgttcaggacttggctttcctcatccaattaataatgacagtgtgacctttatcaacttatttcgcctttcaaaggctctgttttattttctgcaaaaagggaataatactagtgtctacttcacaggtttggagtcagggcaaaatgagataatgcatttaccgcactcagagcctggctcattacaggagttctttattattggatattgcagttatttcatttttttcatgtatgtaatgtttgctaagctatgcacagtcagtgccatcagtttccttaccattcagttgttaatcacagagtttgattccattacaataataatcgctgagtcagactttcaccccactgtaacttgtccctagtggaaatttttccattagtttctgaaacttgggacctctctgttgtttccctcatgcagatttggtcacactagatgacctcatttggttgtcgtggggtttatttctgtagtgatgatagcctcttacattccctccaccatagaacttggtagggatgagaactagctggacggggccagtaacggggttgcatatgaccttctgggtggttctagagtctggatctgagtcacttctggcaatggatcagccataggatttcataagagtggccattagagcccttttaagcagaatactgaagtctggggatggaaccaacctaggattaagagttggggaatcagctatcaccagcatgaggtgggatggagaaggggatgaggctagcacaacattagggaattttgctgctgttttggtgggcaatataggtttggctgtgtgtttgtcttcttgtgtcttggtgacatcttagagcctcacactactcccttcctcaacttatttatttattggaaaatataataaaattgagataatttttacctttaacataaaagttcggctctaaaaaatgtttggcaaagcagaaactctaagtactaatgaggatatgagttgctcctacagccactttagagagctactaaatgcaaataagcatgacctgattctaggctcacaccctaaaaaatctctcccacagtactaagacagacttgtacaagcatatttatagcagtgttgtttgtaaaaatatgaaattattattaaggaagagtagtaaaccaggtcagatttatacaaggaaatactagaaagcagttaaaatggatgaactgtagttacatatgtcagcctgaattaaacaacgttgaatttaataggtgtgttgagaattacaggtacagtatcatacaatttaaatgatattaaagaacatgcaaatgatactgtatttatgcatttatgtatagtgaaagtataaatgcattcattcacatgttgaatactgtatttagataacaagtgctatgtctagagaaggaagagaatgagatgggggagataaagcatcagagatttgtattctatggatatgtatttaagttaaaaaatgacagcaaaaacaaatatttgagggggtggataccacgttttccatgatgtgattattatacattgcatgcctatatcaaatatctcatgtaccctataaatgtatatacctattatgtacccacaaaaattaaaagtaaaaaatttaaaaggacaaaatattaagttttaaggagactgaagtatgttttatattctctatttgttatctgattaacgtatttcaccattttcttaaatggggaaataaggacagaggaaattaacatataaccacaacaaattctagcagtgcaagggaaagtaagcctttatcacactgctgatccctgatcccttgttcctgtggccagagaaaactgctgttttttttttaatttttattttttattttttgagacggagtctcgctctgtctcccaggctggagtgcagtggtgcaatctcctcactgcaagctctgcctcccaggttcacgccattctcctgcctcagcctcctgaatagctgggactacaggcacccaccaccatgcccggctgattttttgtatttttagtagagacggggtttcaccgtgttagccaggatggtctcgatctcctgacctcgtgatccacccgcctggacctcccaaagtgctgggattacaggcttgagccaccgcgcccggctgaaaactactcttaatagttacccatgaatcctcatgacagccggtgatatagaagcatattgtatgcacattccttttacacctgcatggtaaatgctctttgctcctttcactacactatgtataccttggaggtcatttatcctgcaatatctgaccttttcttctaaagaaacttttgcttcatgaaggtaagtacaactacagtttctctaaagctcagttttgaaatcagtgatataaaatacatagggtcagttttacatagtaagttgtcaagacagattgcactcagactcaaaccaaccttgaaaacaaagtactgtatatctgtatttacatttgaaaggctcttttcccacttcagtttgtcaaacagttgaatatgttaagcttgagactagagacaatgtcagggtgaacatatgtgagggattcacacttctcaaagaaaagcacgctttttgtggccttggacaaagctgggattccgtgctgttgttattttcacaagtccctctactgagatcatgactgcatcttagagttgctgttgaatacagatgatgttaattttgttctcattcatattctatttagtttttaccaaactaaatgtttattagttggtgatatttaggaagtttgataggattgtgactatatagctatattttatgaaaaatggaggaaaagttccctttaaaatacctaaattttttttgagttaaagaaagaaaaataaaattcatgaaatagtgacgtgaagcttggtagtttagctgcagctgccaggtgtctaggctggctcttgggagagattattatgggatcacagtgagcctggctacacagagcatggaaagtcccctcgtccttgtcatcacagagtttggcttacagacctctcctctcaaagatggaggcttctggtctttctgatattgttttctcttcctgtccctccttatagagagaaatccaaaatatttttgctaaaattctctagagttgaatttgggaacaccaggggataaaacccctcatgttaaggcatgtaggaggaaaggtatcctcttatcaatcgaattgtagttcaaatatgctgtaaacccacctgtttactccttcgtggtggccgtaagatgtgaaaaggcaggggctccagaagttctaggtaggagtcctttgttcttatgtttttcaagggtctcatggtgaccaacattgttaacttcttttagcctctgtttcctcaccctcaaatgaggtcaatagtatctactttcagaagtgatattcaaaatatctgatatgggagtgggacttggctgttatcagacagatggcatatgcatcccgtaatgttgtgcctggtgctgtaaggttgtgcctggtgaatgtcaactaggactgttttacagggttgctataagggtaagataagatcatgcacatgaatgtgctttgaaaactgcaaggggatacataaatttgtactattaatgcaaaatacatgcaatgggcaggaagtttgagaagtgctttgagctgtttgaccagaagattctttaatgagaataaggaattattgccctgtgatgtcaatgtatttaaatatatgcttattatacatatattgaactatatatataatatacatatattacacatatattgaactcagcaattgaatgcttaggtatttacctaagaaaaatgaaaacacaattctactcaaaggcttataggtgaatattcaccgtagttttattcatcatagctaaaaactggcaacaatttcttatgttgatcacctgctgaatgagtaaacatgctgtgatgcctccatacaatggaacactacccagcaataaaatggaacacatgcctgatggacacagtaatgtagacaagtctcaagtgcattatgctaactgaaagaagacagacacaaaacattacgcaccatatgattctatttctatgaaattctatcaaaggcaaaactttagcaacagaaatcagatagtggttttcaggggccggggtcaggggagagattggctgtaagaggtatgaggaaactttctgaagtaatggaaatattctatctcttgattgtggtggtggttacatgattctatatgtatttgtcaaaatctatggaattgtatactgaaaaattgatcaatttcattatacataaattatacttcaaaaaaatggaactgggtaaaaatagttccctcatgaaaaaaatagaaaatgcaatgttgaaagagaaaggaggaacattctttacaaaacaaaatgtttcttctttataggctatatatttcagtttcagcttcgagtaatgaattttatggcttcgtctcttgcattgagcattacactctagtgaacacccaacttgctaagtcgtcccccatacacaccttactgtttctctctttgttatcatttccttatgctgagcacttgcctggagtagctccctcccccagccttccctggggctctcatttcctccctcactcatttggttaactcttatttaccattgaagattcagtttggaattcaccttctccaagagccttcccctggtttctccccatccctttcacattggggctcatttgggtatccctggccattagctttgtcagtatactcaccagatttcactataagtagctctttatgggtttgtcttccccaaaagaggttaaggactatatcttacacacttttataccctggtgcccagcatgttgctgatggtcaatagatgtttgtagaattagtgattgggagtgccaaagggagtggtgaggacatgtgagattgtggaaagaatgcaagggaaggaagattatttgaatcccagtctctcacttagtggttagagtaactttggacaagttggttaatgtgtctcagatagaagatggagatctagacccatctactggataggattaccataagatctacataaaactatgatgtgaaagcactctgtacctagtaaagcagttcacacacataagttattattatgtcattggaagagtgttgtttctcagctcttggatatagcaatgtaaaccaaaccaaacggataaaatatattcaccttcaactttaagggtagtgtctgcattgcattgatatgttcacctgactccttatagcatctagttagaacttcctctgctcataagagacagctatagtcttgtcagtcctttcactctgttatttctcattgaagcaattgctaaccagtgtatataatttttgaaaacatggatcttgttttatttagctttgggtcctctatagcacttactagagttcattgcatctagaaatgttaaaatggcaagccaagtagaggttaacatagacatctagagaaatgttatccagttttccagagaaggctaaatatcaaaatagtgttgtaattaaatcttatttttagaatctgataaagtaattttgggttaccacagaaatctttcaagtttaagctaataaaatattaatgtcctggatctttggaaatctactaatgtcttcatttggaacttcataagaatcaagaatttcactgcatctaagatccgttttccacaagtcttaaaatctgaactacagcacgttatctatgtgatattctttctagcatttcataaacgtattcttttaaaaaaataattattttatcttgattatagaagaatggagtctataccttatttgtaggtgatagagcaagcaccaggcccttgacccactcttactgcctccgttcatcattatttttagtttctactaacctttattgtattatttggaacaaaatggaagaaaacctaactgggtgtataaattttgatgtacattaacaattcatcaaagtgatattatagataatgtgactgttttcataaacaaaacaggactaaaataaatgaatatgcagaagaaagtgtgagagatactgaaatattttgctggtatagtatattatgcagatgtttgcatttatgaggtagaactagaaaacaaaaaaactctatgttataatcatttttaataaatgaatttttatttccaggtaatttatacctatattcaagtcttggtaagcaatttaaaataatttgctgacttgttgatctcacctttcaaataatatgccaagggccaataacttcttgcaacatgtatagatatttatccaaatgtgtttttgataaggatatgaaaatatttggggaataaatccaatacttatgcttatttatggtacataaatcggagtttcccatgagtgaccgtaaaaattggaggaagtggaaagaaagaggaactgaaatataaaccaaatgtttgtttatgggctttatttagaaatccacattagtgattctgacattgggatattaatccaaaatttcctttctttgtggattattttcacacaaaattgtacattctcatgaggcaattctctttggagtacccatagagaattattacatttttaccagataggttctttttaatattctaatctagcaaatttgcatttaagaaaactactttattccaggatagcttttttgcacaagttattgttctgcccacctcccctcaaataaaaccagcatcataacttctcagagctttgtctgctttcaagattctttggcacctgcactgggttatatgccataccaaaaatgtttcccagccattcatgtttaaatacatttaagtttacattaatttttaaaaggattaaaagcaccttcaaaaatgaagcatgtattctctaagcagcaagtattaatttataggggctgttcatggaaaaaaatgctgttattgtatgtctcttgccccatgcataataaagaacttttctttttgaaagtaattgctgtaaaatattccttgagggatcaaaatattagtatgactgggaagtaggatctctgttcttaggcagattgttttgttacttagttccaaatataaaactggacaaaagtaggtgaggtaagggaatgatagagtggttagaagagatctttagataagaacatctttggcaacagggatagggccttcacgatctttcttaaaatcctggagcggcaggcttcacgtgggaggaaaccaggggttgccactagatcagctaagagacaagcaaataagaggctgggtgcagaaaatgctgagtctctccgaaggtttttccctcaagctgagctggtgtctggttttctgaccacatgttgtttcttctctttataagagtgaaacaacattcctgtttaaaaaaaaaaagccaaaatgtttgtcatcaagcctgacagtgatatgggtcctcactcaaatacagtgagacttcttcctacgatattggtcctgtggagttaggtcagaaggatgtggttataaaataaagtgatttcattttgtttatctcctactcagaaactttcagtgttccccctttcccgcagtgacaacaggaaaaggcccaaaagcttcagcatggcaggtggaggccttctagaacctggttccaatcttagcataacttttaccacttcctaactcaagcctcaactctagctcaaccattcttctatgtaatcaagagatattctaggcacttctggtgggaagtagagaataagccaaggctgggaggggtgaggcctggggaactttaacagagattagtacccagatcactaaatttggggttggagggtgaggcaaagaactctggtactgtctacactgacagtctttctaaggtacctttccaagaagagaagacagtgcttgcctagtgactgtgatggttcagggataatgtgacaattcttgacaccctgctgttactttacttatagatcagaacatattctgtgagctgatatattagattttagaaggagaagccaatcccaaaagacaggtaggaattaaatggggaactcaggatacccaactatcagtttggtggccagagctggacttgctttcttgaggaaattatgatgaaaaccagggcctgagtcttgcagtcaaactggcctctgaaagagagggctggaggtgggaatgggtgggaaaatggcagctcactctgctgcctaggactcataacgcctggtatatcagataccagaaaacaagtattatactattccagagattatctgtcttactaatagggccctgggtagggcagagcctataggcttttaattttgacacctgggcaggacaagttctttcagtgacggacacttatcttccagcactataataggcctcattatggtacatatgataaattatcttgtccaattaatttatgccactttagactaaggactgtcatatatatacatatatatacacacatatatatacacacatacatatatatgcacatatatatatatagtttctttaggtcttaccaaagtattaaatactttttgaacaaataacgtattttggggggcattattctgtccacttacctaaatcaaggatgatataaacaataaatacaatttcaataaattagattttaatttttttttaatgaacagaaagccaattgattggtttcctgaagctctattgtttcctcctgtcaatggaatacaaaatcacaggaactctttatcacttagattggagattacgaatgccgtgaaggcaagtaactgcctttcttcttctaattattttggaaagaacatatttttcactagaaagaccagaagctggaaagccaaaggctttggccacaaaactgtgaagggactctggatggatggaggctccacaagagcttcattccaaattaagatgttcaggctacattgaagaaagcaatctatttgccttggaaaaatttattagtgctaagagctaatatatgaaatatacaatctgtatctggatgtttgcatttctctaaatcttgccctcaacatatatatcattttcaataaatggttttgagccataattttttcattcattctatatgccagttggtgtgcaggtggtgttgatatagaaatgagtaaggcacaggtgctaacatcaggggctcacagtcctcactggcatcaggtgaagcactgcatgcaatacaaggacaagtcctcaagcaactgatgcatagatttttaaaaagtggtatagccatacaacagaatagtctttggcaataaaaatgaatgaagtactggtgcatgctaaaaacctcagaaacattaggataaatgaaaaatgccaatcacaaaagaccacattttatatgattccatttatataaaatgtatagaataggcaaagacatggaaatagaaagtacattggtagttgccaggggtttggcaaccccactttgccagcggagggtgcagatggggagtgattattaatggtactgtgtttgtcgtagaggtgattaaaacctttcaaaattgattgtggtgatggctgcataactctgtgaaatactaagaacctttaaatgaacgcttcaaatgagtgaattgtatgacatgtgaatttaacctgaacaaaggtattataaaaagagagagagagaaatggtaggaggagatagatctttcaaaaaattgtgaattaggggaagtagagaaaagggaaggtgttaaaagaagatgttttaatctacattggttatcaaatgtacacaacagttttaagtacacattctcatttcatccaaacaacattgctgtgattttgctgttatttagataaggaaatggaagcttggagagcttaagcgatttgccaaaatacatacaacttaacaagcagaatgggctattaaggtcagacctgaggaaagcagatcacagttgagggggttggaggaaaaaaagaaagaaagaaagagaaagaaagacaagatgaagatacagggattttgaattctctgatcccagaagctctcattggctaaatcacagttttagcactgttcacttttattcttttgtaggctaatgtactaagctaattatgtatttacattttaaattccttgaggactaggcaatgtctctatcatttagattcttctaggtacaggcatccctcggagatattgtgggttttgattctggaccaccacagtaaagtaaatatcacaataaaattttttggtttcccagtacatataaaagttatgtagtctattaagtgtgtaatagcattatggctaaaagaatgtacatactttaatttataaatactattaatatattgctaaaaatgctaactgtcatctgtgccttcagcaagttgtaatctttttgctggtggtggtcttgccttgatgttgacggctgccgactgatgagggtggtggttgctgaaggctagggtggctgtggcaatttcttaaaataagacaacaatgaagtttgctgcaatgaatgatatttctttcatgaaagattcttctggagtatgtgatggtgtttggtagcatttttcccacagtaggacttccaaaattggagccagttctctcaaatcctgccattgccttatcagctaagtttatggaacattctaaatcctttgttgtcatttcaacaatgttcacacaccttcaccaggagtagattccatctcaggaaactcgtttatttgctcatccataaaaagcaactcctcatctgttaaagctttattgtgagattgcagtaatttagtcatatcttcaggctccacttctaattctagttcttttgttatttctcctacatctgcaggtacttcctcctctgaagtcttgaacccctcaaagtcatccatgagggttggaatcaacttcttccaaactcctgttaatgttgatatttttacctccttccataaatcatgaatattcttaatggaatctagaatggtgaatcttttccagaaggttgttgatttactttgcttagatacatcagaggaatcacaatctatggcagccatagccttatgaaatgtatttgttaaataataagacttgaaggttgaaattgctatttgatccatgggcttcagattggatgttgtattagcaggcaagaaaacaacattaattttcttgtatatcttcatcagaactcctgagtgaacaggtgccatgccaattagcagtaatattttgaaaggattttttttctgagcagtacatctcaagagtgggcttaaaatatttactaaaccatactgtttaataaaccatatctgttctataaacagatacgctgtcatccaggctttgttgtttcatttatagagcactgttagagtagatttagcataacttttaaaagccctatgatttttggaaaggtaaatgaatattggcttcaacaaagtcatagctacattagtttccaacaagaaggtcagcctgtccatttgaagctttgaatccaggcattgacttctctctagctatgaaagttctagatcttctaatagaaggctgttttgtctacattgaaaatctgttgttcagcgtagtgacatacctcaatggtcttaactgggttttctggataactagctatagcttctacattagcacttgctgcttcaccttgcattttcatgttatgggccctctttccttaaatgaaccaacctctgctagcttatatgggtgcagttcatggtgctccaaaacaattatgatagtaaatcagaactcactgctcacaggttatcataacagatatagtaaaaatgaaaaagcttgaaatattgcaataacttttcttttgtagcttccttacttctttcagccatcatagaattgaagagagttagggctttcctctggattaggctttggcttaagggaatgttgtagggggtttgatcttctgtccagacagccagaactttcaccctatcagcaataagactattttgctttcttatcactcacgtgttcgctggactagcactttttttttttttattattgagacagagtcttgctctgtcacacaggctgcactgctttggtgcaatcctggctcactgcagccttgatctcccaggctcaagcaatcctcccacctcagccttctgagtagctgggactataggtacatgccaccatgcccagttaattttaaaatttttttgtggagacagggtctcactatgttgcccaagctggtctccaactactggattcaagcaattctcctaccttggcttcccaaattgctgggattacagcaatgggccaccacacctagccagcactcataatttccttcaagaacttttcctttgcattcacaacttagctaactgtttggcacaagaggcctagcttttgccctatcttggctattgacatgccttcctcactaagcctaaccatttcttgtttttgatttaaagtgagaaatgtgtgactcctttcacatgaacactaagaggccatcgtaggttattaattggcctaatttcaatggtgttgtatcttagggaatagggaagcctgaggagagggagagagcaccatgtactgcacccatataagaagagaaacctaatcaataaactttgtgttctgactgctccatcaaccttccggacaagtcagaacacaagcaacatttattgattaggtttctcttcttacatgggtgtagttcgtggtgctccaaaacaattacaatagcaatatcagagctcactgatcatagatcatcataacagatatagtaaaaatgaaaattcttgaaatattgcaagaattacctaaatgtgacacagagacatgaagtgaacaactgctcttggaaaaatggtatggatagacttgcttgatgtggggttgcaacaaactcgatttgtaaaaaacgcattcatctgtgaagcacaaaaaggcaaagcaaataaaatgaggtatgcttgaatatttggggacctgactacccatttgcctgttttgggcaactgtattctgagaaaaatctgagctcattggcaaccaatcagtagaagtagggtggccacagatacagacatatgtccttgttagttgttattattttgtaagagagtatcacctgtagtgtcaatatgtattaccctgccctgaactgataacatggaacacacattagctccaagtttttggcagagatgctgtcctttaactctttgttattcaatcctcatcaaatccttctttcctttttctaattgcactccttttatactcccgtatcaaatccttcaatgtaaactgttaattctatttctaaaatatattgcaaattcagccacttctttttctcttctgtgaaatcaggcctggccatctccatcatctttgtttaggtctttcttttcagctggttacattactttcaagtctgtctctcctctactccgtaactgaaaaactatattttttttctatggaaattccatcacatagctccctgaaggtcctcctgcctagaaaaattatcatcacacaattaccttttaaaacacatcttaaaaacccaatcagcaaatgtttgaggggctaatatgagggagcttcaaaaagtttgtggaaaaagtgaattaaaaataaaaatgaaaaatataacctttatttctcaacataagctccatcaagttcaaaacacttttgtaagtgatgatatcagccatttagtttatccctaaataactgggcactctaggtatataaccatatcattgcagtcttttttacattattaactaaagaaaaatgggtgccctttacagatttttaagattaggaaacaaaaaaaaatcaaaaggagttaaatcaggactttcaggtggatgcctaataactttcccttgaaacttttgtaaaattgcccttgtttgatgagcagaatgagcaggagcatcattgtggtggagaaggattttctggtgaagctctcctgggcatttttctgctaaagatttggctatgtttctcaaaacactgttataataagcagatattattgttctttcacctgcagaaagacaataagcaaaatgccttgatcatcccaaaaaactgttgccatgacctttgctcttcattggtcagcttttgctttcacaggaccacttccacctcttggtagccatggctttgcttgtgctttgtcttcaggatcataccggaaagccatgtttcatctcctgttacagttatttaaagaaatgctatagaatcttgattccacttgtttaaaattttcattgaaacctctgctcttctctgcagctgatctgggcacaatggttttggcacccatcaagtggaaagtttgcccaactttgatattttagtcagaattgcataagctgacaaatcaagatatctatggtgttggttattgtttctgctgttaattgtcactcttcttcaattaggacatgaacaaagtgaatttttttcctcacagattgatgtggatggtctgccactgcaagcttcattttcaacattgtcttgtcccttcttaaaatgagttatcgatctgtaggctgctgattcctttgaggcattgtccctgtaaacttttcataaagcagcagtgatttcaccattcttcttcccaagcttcaccttaaatgtgatgtttgttcttgtttcaattttagcagaattcatgttgcactgatgggggctctttttcaaaaaaatattttttattgtactaaaatatacatatataatttaccatctttatcttttttaagtgtgtagttcagtggtaataaatgcatttatattctatttgtttctttgactcttctcccctctccccttcctggcctctgataactaccaatctctatctttatgagatctacttttttagctcccacatgtgagtgagactatatgatatttgtctttctgtgcttggactttttcacttaacataatggtcttcaattccatctatgttgctgcaaatgacaggatttcattcatttttatggctgaatgatatttcattgtgtatatatatggcgttttctttcttcattcatctgttgatgggtacttagcttgattccgtattttcactattgttagcagtgctgaaataaacacgggagtgcagatatctctttgatgtattgatttcctttctttttgatatataccaagtagtagaattactggatcatatggtggttctacttttagttttttgaggaaccttcatactgtacattaggctgtactaatttgcattcccaccaacagtgtatgaaggttcccctttctccacatcctcaccagcatctgttattgtgtgtggtgagatgctgtctcattgtggttttcatttgcatttctctgatgattagggatattgagcatttttttcatgtacttcttggccatttgtatgtcttttgagaaatgtctgttcaaaccttttgcccaatatttaatctgaatttttttttttttttttttttttttgctattgagttgtttgaactccttatatgttctggttattaatcccttgtcagatggatagtttgcaaatattttctctcattctgtgtgttgtcttttcactttgtcgattgtttgctgtgcagaagctttttaggttgatataatcccaattatatatttttgcttgggttgcctgtgcttttcaggtcttaaacaaaaaatatttgcccagaccaatgttctgggacatttctccaaagttttattctagtggtttcattgttttaggacttctattgaaatattttatccattttgatttgatttttgtgtatagtgggaaatagaggtccaatttcattcttttgcatatagctatccagtttttgataggggctcttttaaaactgatgtcttatccttcttagtgcctcaaactagattctgttcagatatgttataataaattagtatgagtttattttgatgcaaaaaagttgaaatctatttttttataatacacatttttcatgaacttcttgaagacccctcctatttgccagacactgttctttcattgactaataaataaattctctctcctttcttttttcatttttcagctcttgggttttacagttttaaaaattaatttttaattagacaagtaaaaattatatgatttgtactgtacaagtgtgatgttttgatatgtatgtacactgtgtaatggccaaatcaggcatatccattacctcacatacttaacatttttttgtggtgataacacttagaatctatcctcttagcaattttcaagtatacaatctattgttattaactatagtcagcatgatgtacaacatatctcttgaactttttctaactgaaaatttgtgtcctttgaccaacttcttcccaatctctacattccctcatctctggtaatcattattttactctctgtttctatgaatttgagttttctagattccacgtataagtaagctcagatggcatttttctttgtgtgcctggcctattttacttaacataatggccttcaagttcatccaagttgttgcaaatgacaatatttctttttttggtaaggccgaatagtaattccattgtgcctatataccacatttcctttatccattcattcactgatggacacttaggttgattccatatcttgggtattgtcaataatgttgtaatgaacataggagtgcaggtatctctttgacatactgatttcatattctttggatatgtgtacccagtagtgggattgctgggtcatatggtagccctatttttaattttttagctctatttttaattttttgaggagcctctacactgtttttcataatggcattctcaatttacattctcttcaacagtgtacaaggattcccttttctacttatccctgccaacacaaattctaactcttcaccatggcccaggaggtcctgcatgatatggttcctgcctttttgtcagattttgtctcatgtttctctttgccctttctcactgcactccagccacaaaaatcctctttcagcttcttgtgaaggttttcctgcctagaggcttttgtaggtacagtgacctctgcaatgagtattcttgtctccattcttcttgtccatagttcgttagcataaaatccttcagtttttcagcttaaatatctcctcagagaagtcttccctgatcacctaatacaaagaagttttctgtccccctcattcttcagttagctaaaaataatagaaaacccaaaacaatagttgcttacacaccatagaagtttctttctctgtcatatgaaattatagataactatgcaccagagtgttagcaacccagattccactgtccagatgttcctttccaagcctacctcgtcatccaggatggcttcttccatctgcatttgagtgaccaggataaagacatgccaccccctttaagtaacatggccacatctagctacagggaagctagaaaatggggtctttttaaaactctagacagtcatcttcccagcaaaattaaaactgttattactaagggagagggagaaaatggaaatggagggatgaagaggagttacattccacattttatactcatggtagaaatggacttttgtacattattgtatcacatggcatttttaattatataattttcttgtaggcaaataactttcttatgggaaatttgtgctactcttaagcaactggcttgttttcctattatggacattgtgaatcttctgcctgattatgttttgctttttgatttgtttgccaggaagtttgtagctaaatttatggtcctctccagcaactacacaaatcctatgatggatattttttctgataatattatctgtagcgttattttattttactatactttcttcctttctttctttaccttcttcctttctttttattttcttcaatgtaattttgcaagtctcttcaaattcctttggtaataagtcaggaaataagtaaaacacaagtataaataaataaagtattttatatttaatgaaggtgataaaagtgcctacattatagggctgtcgagagaatccactgagttaatgtaagtaaaacatttagagcagtgcctggcatattgtaagacctatagaaatgctagttcgttattattattattttaattaaatctttcctgaagtgactgtcagataaatctgcttgataagacagttttactttaacttttgttctaggttaaacaaagagggaaagattaaaatatacatttaaggaccactcagcaacaatcattctatgtcttcatattctaatctacatggcagctagtaaatgcattgtgctgtgtaagataatgtgctaaaactcttagtggagatggcctctaaattttttatgtttagtatttaggcatcttgtagataaaatgtatggatgaataatcagatgaggattcaatgaccagaagtactgttgctctctctccatctctttctgttagaaatagatctccatcagataggtctgtgtttgaattttagatgtactaccaaccacactatgtgacctaggtcaagtctcagctttcatgtcaatatatttaccgatgggtggcagtaatacctatcatatagggacataaggattacattaaataatacatgttaagatctttgcatggttcctggccagagtacacatacaatagctatttctgatatcattattttcactcaagtcttttaaattgaagaattatcaccttttagcacttgaatttatattgaatctatacacacatcatttttttatttaaatatttgaaatccttaccctacaatccaatggaaattctgcaaatgtttaaagttttggactccatgacaaaattgtatagatagaatagtggttttaaatatggctcggggattacaaatggtccacatggatccttgggaatgaatcaagctacgagctcctatagcaataatatttctattaccatagcgtatgtgcctaagtttctggtgtggattaataaattattactgttgttaaatggatgcctggttttcttaattggtagctcatcaaaagcttattaaaaacttcctattcattttgttgatttcagtggttggggataaatggcccaggaggctctttgccctgctaaagtggatcatgaacaatgtgggatatttaattcaattcaattcagcaaacatattgaattcaaaatatgcaaaaagcattgtgctacaaattgtgacaatatcaagggacatcccctgtggtggccttctgttatttggtacccaggatccatttttattctatttgggaactacagccttggcccactccaagctatgtggtttgggtaggattggccccttacccaggtctgggggtggaatggccttgcttggcttaaggtagtcagcataaccctttcctatggccatggtattagatttatgagtgggcatataactcatgaatctttaaaagacttgtgcctggggcttctgaaaaaaaatgaagtctcctctgtctttgcagtgggaacttctggaaaagatactttctctttccctgggcctatagttaggatgtaaggtataggagagcctgcagatgttttgggggagaacaccacacagattttgaatatgaagctaacaccatgggtttggagtcggtctgacctggattcaaatccaagcactgtcactttctagtttggtaaggtatttgagcttcgttgtgcctccattttgtcacctataaaatgtggctaatgcccttactctctcctccttaaaactatttggtactggcttttaattgtaacagaattaacatcaataattggatttgtgcccatcaagccaatgaactttcataaaatgaaatccagaaaattttcatgtaattcatagagttcttatatttaacccatgtctctagaatcttcttctagtgacaaattatgttgtattgaatcatgtgaaactgagccaagtttatcattatttagggtagaaattctgttttgttacagtagtttcactcaagttttacttctctaagaagaacataagacacacttaaaattttaagcatatctacataaaaaagcccagtttgttataccattttcatagagttattttagccctctaatatagcactgtaataacattttgtacttgctacaaacataagcacactagtttctatcatttttgcccttggtttataaagatggaatttagaaagcaaatacatttagggatgaaatagtgaaatctgctgaatgtgtgtagaattattaaagagtataacatggctgcttgttttatttagaaatgacattgggtgggttagctaaccaaagctgccaatactgtattttaatgatcttgagtttatctcctatttacaattctttgtcatttagtctacaggtgttagatcacttaacacttgctgaattcttcagatttgtttgtttcctgccgtttggtgttgatcattttgatgtgtgataggaggaggaagtagttatctaattttcactgaacaatcttccctaaggtatcacatatattcattctatatcttctatcagtcagccatagattgtgaaaaactttgatagaaactttaaattcagagcccctgaattagtcagttttcactcagtaatgctatgataacaaacaacctccaaaatctcagtggttcacaaaaaccaagctttaattcttgttctgtatatatatatacatatatctgccgattagtagtgcctttgctcctgcctcaggtatctttttttaccccagaatgcagacagaaggagcagcttccatctgggacatgccattctcctggctgagggcaatgatctctctttttcttttttcttttactttttaagttctggggtacatatgcaggatgtgcaggtttgttaacataggtaaacgtgtgccatggtggtttgttgcacccatcagcccattacctaggtattaagtcaagcatgcattagctgtttttgccaatgctctccctccccgtactccactcctcaacaggcctcagtgtgtgttgttcccctccctgtgtccgtgtgttttcattgttcagctcccacttataagcgagaacatgcagtatttgatttactgtttctgcattagtttgctgaggataatggcttccagctccacccatgaccctgcaaaggacatgatcttgttcctttttatggctgcatagtattccacggtgtatatgtaccacattttcttagagacaatgccaaatcttgcaatggtccttaaagctcctgctcaattatgactgtatatcatgcgtattcatattccattggccagagaaagtctcttggccaagtccaagctcagtgtctttgactgagatatcgcagtttacaaggcaatgggtgggcatgagttttaagaggaaataatggaacatatgtcataggtctgttttggacagggctactggtgtatttttctcttatgtcctattcttctgctgtttttttctccaaaaactcccttccttggttctctcatccacccctccatcacttcctctgtactcttggctgccaagtagacccatggagcctactccacttttctgtccagcctgatgtagaatctttaggatataggacctaaattattgctttagtaaaaactggagctgtctgatgttataaggaatagctctactctgagccaagtaggcttggtatttactgaagtcatatccactttgttttattcctggtaatttggcttgaagtgaaattttaaataaaccagatacttattgcttatgcccactaaatatatgtccacagcccttaaataactacctttgtcttatagtgctttatggaacatagagcaattttaccaccattatctcatatgatggtcacaagaagcctggtgatgccaatattattgtgattcccatttcacaggataaaaaaaagttaagtagcttattcaggatcaaaaggctggtgagctttatagccagcattcaagccagggtatatagtgataggcatttcttgttattgacaaagaaatcctctgctttaagcatatatcgaataatgcataatgtaataaataccctgttttttcaaaaaaaagttacagagtaagatgttggcttgtttcactgaaaatattcaacttaaaatttttagaaatgtcttattagttttgaatgatctgatgactaaatttcagtttatataaaactttccctcataaaacaatcattacacagtttgggcactatgcttgctggagtataaaaccccattgcagtaaacagtgtgtcatcatgctgttactgaaagtggcctactatgctttatctccactgccctgtcccaatctaagccactgtcacctcttacccagaatgtggcagtagtcctttcaacagtcctctataccttttctgacttcctccaagcttttcctcaagctgagcctagtgatatttttaactgtgaatgtgaatttgtctgacttccctatccttacccaaagtccttaatacaagtctcccatgtgatatcaccctgcaaacgtggccagccttctatcgtcattctctccctcaatttctgcttactttctcatcttagtcctctctcctacccaccctccagccagtgtctcctagtcaattggcactcatttttcccatcccagcttcccagggaagctagccatgacccccagaccatgataactagcccattttagtctactgtagctggcaactcacctccatatcccacccattgccacacctggattttcctctgtaaatactgcttgaacctgactgaggtgcattatgcttcctgctgctcactttaccaggttagatgacagcggttttcatgaaagccgtccctcactcacgcacattagtcacctttacaaggaaacacccagtgattagagagaaagcaaccaccatgtcagccatgcttcaaagcaaccatattcaaaacaagttgtttttggaaaagagtatatttcatgttttagagtataaatgttccctgtgataattactataagaaatcaagatactccagtctgagtgcctgttcatgctgctgcaaaaacaatgggaaaagtttggattttaaggcaatccaatttctaaggaccagaagcagtctatgcttatggctgcttattgctagttgggttcttataaacctggagtgtcctacatttcatgttgaattgaacataatgggcctgtgataggcacctctccacaaaataacaaaagtctctgtataaactcaatattttagaagtcaaagtagacaggatactttgcttgtggcttgtcctcaggtatcagtacagcaagtggctctcagcacaccaccaaacagggcaggcagctggctctctagagataattataatttattgtgcccatggattttgatgcagtggggtctgggctctctcacaaggccaacagagcaggtctaatttgagccagatctcaggagacacagtccggagaggatgggtcatgtgccttcagttatcacttggagttgcactttgccccttgttcctctttctctcaactagtagctgagttttaatttttttccctgaaaatttattcagagagactgttttccttttcttcctggaattcacagaatgaagatggaggtccataaataccttggttaaaagttggaagatcatagagtgtcccactgtctgttttggggcctggcaggaatactcctaatcactgtaaatgaataggtgtttcatctatttttgtcttctcttctttgttctctacctgaaaatgtccttccctcattttcaggctactgaaatcttctaaagccttcttaaagtttcttctttataggaaacttcctagatttcttcctttagtcagaattaatgctgatttatgttctctcatgaaattgtactttgtactttcatttagtgctgtgactgttctttttaaagttattgtttacttatttttttctcctccagattatacaatccttaaggatagtactggaatttcctcatcttcctattgtccacattgcccagcgtgaaattttggcccagtaggaaggctatacatttgttgaattaattttgatctgtaaggcatattcttccacgaaaaggacattgcacaatcacaatattctccataaacaaatggacactcagaaagaactgttgtgttcttttatctgccttccatgaatgtgcagtttccttaccacttctccatggacctagttatcttgcatagtgcacacattagaagattatgtgataagagtagaaagctaggtttcctttgggtagggctagactatttcctgttcagaggtgaagacttctgaaatcagaatcaattttctaaaacataccacattaaaataagaccatagacacgtttttctgtctataagtctttttattttgatggtagaaaatgttgtaagattatttcattatcttcttattgttaactgttttggggaagaatcaaatcaggagagactgagattggagtctttttatcaaattctctatagactacatgatccgtgccaataccacagcagtcagcagctgttgtctgtgctaggagaccacagtagtaattacacacaggttaagtggcttaaaaaaattgatcggttttgaaaattaggtgtggaagatagaaaggaacctgaggatttttataatatttttgtgatataatagactatagccaaaagagttactttatagtgagtatttttagcttcagtcccacattctcttcagaaattagtattataatccttttcattactctaaccgagtctgatgactcctgtcctaggatgaaacacccctcccaactcccttattaagagattgggacctagtgtgattaacagcaccctgatcgatgagcaagattcttacagattaaggaaaagaattgctgacaacttaggctgacttttatatacctatttgttttccttcctaattcctcttaaaatgaaaatgccaagcttttcttttgatatttgttacatttgtgaaataatataacaatgcagttaatgggaagagcatgacccctggattcagatatccaatagttacaaatctcagcttcagcacctagcagttatgtgaactttcttctctgcacctcagtctcttcataataactactttgcagagttgctgtgaatattagtgtaaataatggacattcaaatatagctattactgttattatcatcatcaattattctacctatagaaatatgcaagttccttggaagtatacatttctggagagtgatcagggatggggtattatacttttattttttcggtttctcttcattcattcagtgggttatgggtatgtgtgtgtgtgtgtgtgtgtttcacacattatgtgctaggcactatttcaggcacttggaacttacattattgtaggggtacaactggaaactgataaatgctgtaaaaaaaattaaacaagctaagaggtacaggaggttgggagagagttgcaattattaatagggacattagggtaggccttactgtgaatatgacacaggttttgtgttcttagaggttttcatgaactatcttttggaatgggaggatgggaagaagggagatgagagtaaagagtaagagcttgctgatttgtaggcaggcatgaatattccctttggtataaggtgtcaaaacacaaactaatatggaagggtaaaattttctaggtggtctagttttattttattccatttgagcaaaaatcttcctaaagtattttgtacacaccctgccttcccaaacaatggctactgaatacagtggcccaccttgtctgtgactgctggaggaggtcatcaccatggctcacatctgttattggactttcatgaaacaagtccctcagggccagaagagatgctgtcatctgtttgtcctatgcaatggcctgagcctgcagtcattgtgagttctacccacatgtggctatttaaatgtacgtataaattaattgaaattaaatgacattaaaaattcagattcttagtcagtctagtcacatttcaagtggtcaatagccacatgtggctaatggctactgtgttagcacagatatcaaacatttctgtcactgtagaaagttctcttagtgttagttattttatatgtttctgactccaacattgttttttgtggtactgttgtcagttttcagaccttatttcctctttttgatttgttgtttctcatagctgataggtttaaatgccagatgtagaattttgtgtaaagtaagggtaaccaggctctaagagatcagaagagctttcttgtgttcaagtttttgtacttggaatttttatttctattctgagtgccccaaggcctcttttgcttggttattgttctgcagctgtactgtaggtgtaagggaatcagactgctgagttcctatgggagaagggctatcaaactttaaaggtaaaactgaacattcatggaaatgctttagatccagtcagcagtctcttatttggagcagcacaactccaggggtgcttaatgaccaactggctacatgtacgccaggcactgggttagtcccttgacacacaaacaagaatgaacatggacccaaatggaggaaattacagtttaaggggtagagagagtttcattaagtcaattcccagatatgtcccaggtactctgaaagtccagagaagggcggtacctgatccaggcttccctgatgttacaggagacaagaggccagggaatgctccctaaagaagtgattcttgagtggaatcttgagggatgcataggtactggtcacatgatgaaggtgggaaaaggtgtctgtataggtaggtgtctatacagggaaaagtgtctgtataggtaggcagactttggatgttgaaatgatgggttttcggcagaagtggaaatggggaagaggggttggggatgctgcctggggcagatctgactcttcagtagtttgacttgttcactctggcagctctgtgaaggtaaaaaggagccaggctggaggctggcacaccggtggtatgggagggccagggagtagagacctgtaatagttcaaaagagaggtaatgagggcctgctgtgagagtgtaagggggttgaacagagttcatgatttcaattggtattgatttctaaggagtaaaattatcagtattgggggattgattacatatgggggataaaggagacagaggaatcagagatgactgtgagttttcagaaaaacagattaatttaaactcttcttccaagttcacagtgataggttttgacctgtagctgctactagtgatttgcattggcaactgtggtgtctagattaggttttggcactttaggactccactctcttgtttgttaaaaacaaaacaaaacaaaacaaaaaaaaacttgaatggaagcatagaccataatgaagtaccaccctcgtgtgactttaatttcacagtggcctatgaaaatttatagaaatttggcttcatttctagtggctccaatccggatgccaaaattgccctattgttgcgacatcccttgagtggactatcgaacctgttattcattaggagcagctgcaaaccatcagccaagttcccatactatgccaacaataacgccagtcaaatttcaaggtaactccaggtttcagaaatgtatgaatctcaaaatctgtctagccaaactcttatttgtatttttatgtatgcatattatatgaaaaaagctggtggtttccttagtttccataattatacattgcttcttttagactataaattgagttctcagtgttggtgaaggcatacctatagatcttagccaatcactttaaagtgaaaatagaaattcagtctggatcatggtaccaggggtagccagcccaaagggcccattatgatgaggcctatattgaaagcaaaaattcttgcatacctgtagtgcattttaaaaggattttccaagtaacagttaacatttgttaagctttcagaaaaacttatttctctagtttttaatattaaggaaatatggaaatatatgttgatactttgttttttactgacatacttcatgactgcatggctaaagccacaaaacactaggcacttaccactttctttcttttagatatatttagccactgcatctggcctttgttgccaaatattttttcccttttactctaactactccatcaatttggatctttaatggtcaggcaaattttgaatgatttcttggaagatgtgaaaccctgttccctaatcaggaaaatgtgggcaagtcttatggtatgagaaaagaagggacatctcttctaacaaagacaacaggattatagcgccattacacaacatcttcaaagtttttatttgaaaaataatgatgtgtttggtgatgaacaagtaccgtaaatgggaagcatgggaagtttccactctttaagaatgtttctatgcaaaggaggaaggaaagcttactttttgtggttcttcagagagattacattaaccatttgttgaaagtttcatttatgaacaacattggcttctaagagtattcttcacacactggcatcctttgtatgatgttgttgtaggttgtttagcaacatatcaaaatagttatataaaaagattaatatgtgtttcattaatcctaaggagagctttctgaaattcatttttaaaaataaatgattagcatcattctttgaaatttgtgacttctgagggtgggaaagaattaaaaaagaagctatcttttcaagcagtttgtgatttaataccagctggtcaagtgagttgaaaaaccttatgatttttatgttatattattttgaatgccttttcactctcttgggaagttggctaaccccacagtccttttcccatggtaaatggctctaaaactttgatcttcttataccagtttgccagatgtagcagaaagagcatgtatgtgacctttcctgtgccaattcaacccagctgatgggaaactgtaagttaatcttgcatgacttttatttctaggcattacagcagaagttctggtggtgacctctttcgatgaactgcagagaagggcctcagaagcaagagggaagattgttgtttataaccaaccttacatcaactactcaaggacggtgcaataccgaacgcagggggcggtggaagctgccaaggtgggggctttggcatctctcattcgatccgtggcctccttctccatctacaggtttgtcacaatgttcatttgaattcctttcaaaaacaagggttttccgtgaaggaaaagtccttatgaagtaaaaacaaaccattcaaatgaaaatacttattgttcatggagtttcccccccaaacacacacacccattccacatttggtcatttgtttgtaatatcttctttggcttttctggattccaagcatcacttgtgcattcctttaaaaagctttaaggcttttcacatccacagtgatcccattacattccttatataactaatatattatgtattttcattggaggaagaactgcgttcatgtctgcatttcatcaaagattcctaatgacttcagagggagccagcctgttttccatgttgctagagaagtggagtaaaaagagagtgggtgacatgatgggggccatctatggtatagtgaagagttagggaattagaggaacttggatacagacttggctctgctcccaaacaactaggtggtcttaggaatgtttcttaaacttctctaggcctcataattttcttctgttaaccaggggtaaagaataataataaatgtacaaaataattttgagattaaatgaggtcaacttgaaaaagatacttaattatctgtaaatgattatctacaaaggtccatataaatatttggtaatattgtttgagagtaacataggacttgtctttttctttgtagttttgattgaggtaatgccaaataactttattggccctcagtcctaggatgaaattcagtattacagtggataaaaagtctaaaaactgagatgtagatgttcagcctagtttaatagctattatggcagtgtcatacgttaaggataaaatatttgagaaacatggggaaaagaagcataactttagtgtgatagcctggcctaagatttttttaaaatgcaaaaataatagcagatagggtttatttgggtctccggattggatttttaatatctattggaaagggaagtttatttattctgcacaattgctatttggaactggagacacagctgcttgaccttaattagcaccctacacccctgaaaataaaaataactggggaacatatgtcagcagctaggaaatccagtcagaggaaagttgtacaaaagtgcagggaaaaggaaagagacattttccttatacagggataagatatcttcccaggggaggaggatggggcatgttaaaactacatgttagaaagttatacgactagttacattgatgtcatagtgctaaaaataatgttctttgcggggtctttagaggtttcaagactagtgaaataatgattgcaccatattcttttggatgattaagcttcccaggagggaagtcctaaaatggctagcttacttcccataatacctccatcaccccttggaataacatattcagcaagctgtggccattcaccatgatttcacggtcatgagacttaaattatggagctggtctgttgctttgtgaaactgggtgattgccagaaacctttatttaagaactactactcataagactaataaattcccaaatgatttaatgcacagtaatttgtcaggattcactggcatttttttttttttttctggcataatgaagacatctggaaacccaagctacaacttaggagtaccagtagaattgtccagcaagggacttcagaatctgttgctagcctctaagactgattataatgtttcactgattttatagccaatccatatttcactggactcttaacttgtataattctattctttcaacatttataaatacataataacattggactttacatagcactttagaatctttcccatgttactttatttgctctgacaacaattcagtggctcatgcagaagggtcattattagccctattttattgatagggaaataaaagttcagacaattagacatattaacatgtttaagttttgcatcctaagaaataaaaacgaaaataaaatgagataaactatgtttgtctacttctagcttattgtttttagaaccaaatttctttgatgagtattctatattcctacctctaattcctcacctttcatttgctcttcagactattatagcctggcttttgccaatactgaaacaggacttgttaaggtcgcaaataactgcctacgtgtcaaatttaatggacatttttcaggccatcatcttacttcacttttatgaagcacttgcctccatcaactgcattttcagtgtttcttctctttggcttccatgacttctttctcatgttttctctctctttcttgcttgctgtcactctcactctcttctctattccttccctatatctctggcttctcactgtgactgtttgacctgtgtatcctcatcatgctcctatgaatgcggttcatacttgtgaagatgtgacttgaaccacaatctacattgtggccatttccaaacccctctctcccatccataccactgccgccagctctaggcctatatattcacctgcctgtggattcttctctgggatgttccatagctatttcagtttcaatttttttcaaaattgacctcatccttcatcttctaagtcacatggtcctttattgcttttttctctttctgtgtccatcatttctaacagacactgagtctcttaggttctgctccttatcagtcatttcaacaattacacacggaacagctccatttcccagcatgactccacattccagcagtcagcaatcactaacacttttcccacgcaccacgtttcctcaaagtgttgtgactttgcatatgctttctcctctgcaaccctccatttcccttctcactgccacacacttatgagtttcttcctctggggatccctccctgatatccacttgtagcccaggtgagttacctcttttttggtatttccacatacatcgttctgtgcatgctctgtatcataatgtcttggaagtattgatagttttggttcgtgctttggtagagtagactaactgttgtaacaaacagcttcaaatctcagtcacttcacacaataggagtcttttgcatgttcacataatggtttcaagggggtggtcagaatgtggccttctgctcctttccatctgtggctctatcatttttgagatctgagttctctgcagagtcttctgcattcatctgacgcataaggggatagagagagaaagtcgataacctagagggagattttccatggttatccatatctaggcctggatatggcacacctcacttctgctgacattctattgggcagaatgctattacatggaggctaggaaatttggcctatctttatgtccagggtgaaaggaaagtgaatttggtgaaatactgcccagtctgccccaattgcctgtctccacactagactctaagttccagaaagacattgattacgtgtattttttaacctctggattcctatcatctagtataatgtttgaaacatggtaataacttaggaaatgtctacggaaggaatgaatttgtctgaggatgtagagtaaatcatggcagggctctcgtaacaaaccagctgacccggttcctggtgctctttgtccgaactatgtaacccatgtatagtaagtttgaaacaacttgaacttttagggtactttgctctgcatttggaggaaaatattcagatgcccaatatgccagattatacattttttctgccactacacttatgaacaaagatgttttgagttgctgattaaggaaaatagctcccttctctctgaaaagcatttcacctctatgggagtgggtgatactggatttcatctaaaaatattatagaggtcagcaacactagagaacattatattatatatatatatatatattatgatttgttgctgttggattcaaaatttgagaatcccctggagggtagtttgatttgaccagtttgattggacactttgtggtgtaatcatcaatatcatcagccattttgggtctgcagtggtcacacagttgcatgacagatgtcctgaaaaaatgtccattgcttgttgtcagcatcgtctccaggttcattattgttattctctgtgttgccattattagtgttcttgggctcaactttacttctaggagatattccctttattaatgcttttctaatgacacttctttccatcaccattatcaactgagacccccccattagagcttttttagtttttctgatggtaaaatacctttctttgcttttgtcctgggaaatatgttttaagaataaatgcaattaattagagatttaagtcccacagaggaaagcttctctatggaacaatttgtcttgcattatttctctaatttatcatattgtttagtacatatttcttgagagcttcctagttgctcagaaatttccgagtactaggattactaaggtgaattccatgtgttttttgtcctcaagaaatatttttatgtagccaaaagagaagggggtaagaacatgtaagtgattagtgttatttattttatatttagtgctaagtgaatgattgggggaaagggataaagaaaggaaattactatttattaagcaccaactttgtactattctaaagggttaaagagtttgtctcaattaattctttatgtaacccaatagaagtagatactgtattggtatctcttttactgaaggagagacaggttcagaatgattaatggcttatcatgctacacatctaatgaaagaactaggattcaaactcagtctctggctctaacttccatgctgttagattgtaccaagcaacctggagagctaatgctataggaatctagaggagataacagaaatctgattggggttggttgcactgacaatgtggatttggggtgtgttcaataaaaaggcagaattgaccaagagaaaggaggtggaaagactctctgtaaatatcaaagcaaggtgggactgcatgatatatttgggtaaaacacaagcagatcagtttagctggagccaggcctcctagggggtcagagaaatgcaattctggggtgagaggaagagaccaggcttgaagaattcagggtagcagattaggcagttttaagtctaatgtggaggaaatggagaaccatggaatgtgttaaagatatggggtgaattttacagcagtggttcttgaagtgtggtccctggaatagcaacatcaacctatctaggagcttattgatgtgcaaattattaggccccacctaatacccgttgtatcagaaaagctaagggtggggtccagcaatctggtttaacaagccctccaggtgattctgatacacattaaagtttaagaactactgttttagaaagatcaatttggccattgtgcatagcatgcattagacagggaaggacaggttactcctctaataatgcagatatgaagtaatgagggcatagatgatggcaattggaatggaaagaaatcagcaggaggcatagtatgagaacattagaacttggggattgattgtattcaaagggggaaggagtaggggtccaagttgataggcaaggattaaaatctatgggatgaatctgtatttagttcagcccaaaatttaaaaatcttaagtttcaaataacaataaggatttgtggttttagagaaaaaccagatttggtgatatatcttgtatgttccattgggcaaacttcagctgagcagattagccatcaaattcttcttgttgatgggatgtcccccctcttatctgccaagttttcccctctttttttatatactttattcatttatgttgcctattcgagtcctgtagatatttgagctgatgatccctgctctaaggatcccagcttggggacaggagaataagaaatgtaggggtcgggagagggagctggcttggagggaaaccagccagtttggtttctagacattttgagtccgaggcaactgtaagatagtcccattaatctggtctttatattttgcaagaaaaacagttcagcatttccatttctctgttgtccgctttttagatcacccaaggcagtttaaaattctaggctggctttcttgcaataccttgggacttctgcctcctgctttcttagcatgcgagctcaagaatgcaaagtaatttttatattagcccatgtaaaatataattcaaaaggtaactctactgaggccaaactgtttgttgtattcccactgccacacatacattttttcctagttattttctccattgccccagatagttgaacagggactgcgacttttaatcagctaaggaagcaaaagactttctcttcactttactgtgaaaattgcatcaccacactgggtatgaactcattgaggtgggaatgagttgttgatagggcttggctttggaaatactactggctgatgttttatatcacttggcctttgtgtactgtattgacagagtatagtgaagaggaggaggaagaggagcaatttagtttgaagatgactaagagctgattaaacattcagctggggagagagatgagtgaatccaggtgatgtttatggagtgtcagagagggagaatgctataccatctggtgagagagacatgaaaaagtacataaatcaatctctataatgatacttaattaatacagagttgataaatgacataattgaagcaatgggtgggctacatcatagagttaaatagcttcaaagagggtgctgattaaagccattacaatttataaaacattcttcatgttaagaaagcatcttgatgagatttcacatgaacattttgtaatcagagggccagcttaaaacactcagagcagaggtgaaatgtcttaagaggtctattttggatgatttttgaaaaccagttattctcagggaataaaaaagcttgctttccccactccctttgttttttaatgggaaaaaaattaatgttgcattcttcacctttagacaatctcagatttttgatgtcctggtggtttggttcttaagcatgaccttaagataattagctatcaagcttcatttaaattgttttgaaatatcattgcaatttggggagcatatgtgcctgctggtgaaaaataaggaaaataccactgggactcaaaaactgtacaagtgactcacctcgattagtaggcttattttgtttttgcttaactcactctgaagctcataacagatgcacagtaatcaagcagaatgccaattctcatcattcatgcaggtggggccactgtgctcccaagggggaaccagagaagacccacaacaaacactgcgttttttcttctcatcatcctttcttttccccctttctgatttttggaaggtacattctttgtttggaaagcctttgttagaaattccaaaatgttctttaatcactggattcttattattgtatcaggtagtgtgacaggcatgcttcctcataatggatagagccaggcaatgtattttggagcccgcattctggagactccatgcctgtgtctttgttcagccacttgccagatgtgcctcattggtgcctcagtttcatctgtaaaatgggggaaatatcttctttgtttttcttcctggagttttgagggttttctttttttgtttcattttgtttttgtttttctgaggcagagttttgctcttgttgcccaggctgcagtgcaaatggcatgagttcggctaactgctacctccgcctcccgggttcaagcgattctccggtctcagcctcctgagtggctgggattacaggcacccgccaccacgtccagctaattttttgtatttttggtagagatggagagtcaccatgttggccaggctggtcttgaactctcgacctcaggtgatctgcccgccttggctcccaaagtactgagattacaggtgtgagccactgagcctggccttttgtggggtttaaaagcagtaatgttattaatgcctgacctatagtaagttttaagtacatgtaaagttgctactattatacagtcttattaactattgactggacatagttattgaatgaaaaggaggaagggagggaagcaggtaatcagggagggattgagggaaggaagaaagagaagaaaggaaagaaagaagaaggaaggaaggaagaagaaagaagagcttgatttagttaatgtcactgttgtaattggtggattataattgaagctgtctggttgggagacaaaccctatgccatttagatctctgtctgttcagtttgtccaaactctgctggggttatgtatttactagtctgtctccctttttggattggcaattctgcagacagactgtgtgtcttactcatctgggtatcgccagggctgtgctctatacctggcacacagtagtgctggaataaataaagagctggaagcagcacatccctttctctaacatgtaaattcaaggtgtcaccatttcacattcatagacattgaataataatgtagatgaggtgactaaccttttgaattgctactcatcaaaaatggaatctctggaatctgagaggagactatatagttatgtaaatttcggcaaagtattgcaaactccatattactatggtgctttgtggggctgctataattaatggtctgtttgcatttctagtacaggctgtcatttttcatctgcttataaccttgatataaacatttattcttggctgctattttgcattcataattgtaaaatatatataaacgttaaccttctgtttttcagcttttttatttatcaaaagcacagctcaagaatcacatcattgtggcatgtttttctgaatctctagtggcaaaaagaaatgaatgcattttgaattcaggcttcaggattaaggcaatgttgtttgcttatgcagtgccctttgaaaaatgtgtaatgtagcatatgaaccaaaagaatcctgagaaactttttccagccggtctttttctattacttatgccttttttatccctctgtgttcctccccacctctgtcatcagttcaagatgactcttaaagtcctcttgcatccatccaaatgacccattggcctctttaggtgcctggagaaagtaccagcaaaggtatttgttggagtctatcaaaggtaacaatacatagagtgggtttcaaaatcagacaggctgggttctattgttggctctcccatttagatgctgtgtgaccttatgtacattaaacaaccagtgtgagcctgttttctcatctgtaacatgtggagaacaatgtttacctcatagagttgttgagagaattaaatgaaatcaagcccttgacacagactgaaacatgggaagtgattgatgaaatataactgacgtcttatcttggccatggtcattattatcactgtcatcattagatagtgatgggactaagctaggtaggttgacatgagctgacttatcttaaaaggcaccagctctagatagagccctcctcagtgttcaaagactcaaaagacttgggttctgtttatctcccgatttcgggagcccactctccttagtctccctcagtcattgactaaaaactatgcacttgtcttttccattctctctatcctcatgttaaatgcttgatattgttcttgcaagctgtaccaaagttgtggtggcccaaatcagtatcagtggccagcttacccaaaatgcagcaaatattctatttcaaacaatacccaagatattttccacctcagggcctttgcactcactgtcccctttgtctggaatgctgtttccctgctttgtgtatggttggctctgtttcaatctttacattttaactgaaaggttctttttgtgaaaagcctttcctgactatactaagtagagtagcactctccctcaaactctctcacacataatctcctctgtatgcacagaatcctaattatatttggtaatttatgtctatctacctacctacctatctagttttcagcatgtacttctgcataaaaatataaattgcatgaggactggaactgtgtctttcgtgtacctcattgtattctcagtacctaggagattgctggcacagggcaggtacttaagagatattgattgaataaataactattttaaaaatcatctaagacaatagagaaccaattaaacagatacatactgtattatagctatttttctgaagccacattctaaagcaccacagatttttttctcaattttttgttttgttttgttttgagacagggtcttgctctgttgcccaggctggagtacagtggcatgatcatggctcactgcatccttcaccccctgggaccacagacacaaggcacaatgcctgtctattttttaaaaaaaattttagtagagatttttgtggaaaaatataaatctatagtaaggctgaaagaatagtaaatgactcatttactcttctgagatcagacaagatctcagtgtggtatggccatagatgtgactcatatactctttataagaaattgcctaactttttatttttatttttattttttgagacggagtttcactcttgttgcctaggcaggagtaaatggcgcgatctcggctcactgcaacctccgcctcctggattcaagcgattctcctgctttagcctcctgagtagctgggattacagtcatgcaccaccacacctggctattttgtatttttagtagagatagggtttctccatgttggtcaggctggtctcgaactcctgacctcaagtgatccacccacctcagcttcccaaaatgctgggattgcaggcatgagccacggcgcccagcctcctaactttttttaaggaagttgtaccattttatattttcggcagtcatgtgtgacacttcaggctgctccacattcttgccaaaatttaattttagcctttttggcagatatgtattggtatatcactgaagttttgatttacatctccctgatttctgaatccctctttgtgaaaagtctactccaggcttttgcccatctataatttttttaaaaattactgagtggtaggagttctttatataatttagatacagatccgtagtcagatatatgttttgcaaatattttctcccagctgatgtctttcccatcttttgtgtcatagagtcttttcttaatagtgccttttgatgagtagaagttttaaattttgaagtctaatttatccacttttagttgctttcttttatatgcatctacattcattactcaatattttgccacatttgctttctctctctctctctctgtttctggatcatttgaaagtaaggttgttataacactgaaaacatttcacccataaatatataagcatgtattcataagagcaaggaccacctctaacataactgtaatatctttgtcatgcctaagaaatttagcattgctatagaaatattatttaatttaaaattcatccatattcagattttcccaattgtttcccccagtaatgttgttgatcttttctttctgaattccataatccaatcaaggacatacattacatttagttgtcataaagctttagtctccttatatctaaaattgctccctagtctttttagtattttatgacactaacattttcaaagaatataagggagttattttgcacaatgactctcagtttggagttgttcctcattattagattcacgttaaatatatttggcaagggttctatatggataatgtcatgcccctcattgcatcacataaggaaacaaataatgtcacttttccttattggtgagaccaaatttgatcacttgtctaaggcattatctctggatttctttatcgaaaggtagcattccacctttgtagaggaaatacattgcaattattgtgggatgctcttgagactttgtgaatcttaagttctttaacaaaatttcacccagtgagattttaacatccgttgatgacccctgcctgaatcaatcattgtactggaagttgcaaatgtttttctaattcaattatttctattacaattatttgctgtgtgcttttgtaataaagagcatctgcctccttttccttctttttgtttctgatgatcacttcatgggtttttaaaaaatgtatgtgataaaattcattactatcatcattctttttgataaagcatcaaaaatttcaaaataattaatgtaaaagttagcattacatgataagcttgaatatttgaagcactggaaggaatactctttttattcatccaaagttacccagactaccacagataagtcaactaattaggagtgtgtaatcaatatcatttcctctgaactttttattaacagcatgagctttggggtaataatcctgaagttatttttagtttacaattgccaatgtatagaatatgcaaataaagatccttcatcccatacataattgctgttaattgttaaaataagtgagcaaaatctcaggtccagcaattgcttctgagtttctgcagactgatatttgttttccttttttttttttttttttaaactatgcagctctgatgttgaggagtatgaaaagagcttttttttttttttttttttgcaagagaaataaggatctcaatataggtttgcagaggccagcagggatgtatctttaggatgggtttacctcatatctgtgtaatacagagaactataaattatccacccactccaacctccccatgtcatcagtggttgtgaaggggtaactagcctctgcctgggtgtcaacagtaatagtttaatagctcagtgaatgtctgttgcctcactggttactgctccgtagagtaaatatttgacatcaaggacaagaatttaatttttaactttctcaacttaattttattcagtaaacatttattatgtgtcttctatatttcaagccaggagaagacccaatttttgtaggggtaggaacttacataatttgggggcctctttaagaaaaacaatacaaagttacttctacacatttagatataaaatcaacatttatttacaatagggaagaaattataacaatttatgaatttaagagagccaccaaatactacaaacgtgacacaattcagaaaaatatcttgttttgattaaataactacctatcaagctgctgtactttgtctgcattttttatttgcacattctttgattgctctttgtatgacagtgcttttgtgttgtagtttctaaaacaagaataaaaaaggaattcagtctttcctgtagtatggttgatcataatttagcttttattattgatagtttggaaaagtttatttcagctttatagcttttttattggtagtatcattatacaattttaggattgttgtcaaatttgggaaaatgttatcaagttttgttcatgtatgggctgtaagatttcaggacattttatgtttttgtatagtgacaatgaatgaacatcattccatttagtttgctgtctagatcctcgtttttagtggcattttatgaatttttgttatgtttgtatttgtcagcattttgtgtcaaaccaacaagaaatttcaatcttttctcaaggtgatgtactttttcattatttggcttattgagtgatctgtgagactactcatcccaaatacccaaagtatgtctctttctgtcaataaactgtagttttgtatggcttttgtctgggaatgccatactttgtcagaataagatgtggtgtatattttaacatgtaatccaatatgttaacacaaataaaactgtgacttcatacatagatgcatttgctctttgagctctacaatcacaggaattctgataaattctattttgcatgacttccttaaaaatataaaattagaggttgtgttcgcaatagcatactctgaattactgaacctattcttgataggagagaacttccattttaagtaggaattaatgaggattggatacctcgactgcagttctgcatatctgataactggaagcattttccagtgactggcttctggatctccaccactgtctccatgctttcactgccagatgttgcaggatgcattcttgttacaatatgacctctgaccctgtgtctttgtattatgacactagtagtcccgggacacattcctgtaccaagatggaaacaactgtgaatcacctaagcacatccctgtaaacccaagccaatatatctccaggtcagcttctcctagctggatcctcaatgcctatagtcaatccagtgctgctccatatgttgggaagtatgacagaaaggaagtcagagtggattaaaagattccacacctttggtgtgcatggattggtgcagcccttctagtgagacatccccagatgttagctgataacatcctcaccctcatcctccccaccatcacttctctatgttttactggcctgatccagtttttggtggcttggcacttggaattctttacaagcactttctttctatattgacttactatcatttttagaacccagattttttaaatgttcaagctggatgaacccttatacatttgctctactctttcattttataaatgaggagcttggggctgaaggtcattcagctaagtagaagaacaaggacacattattttttagctctttatgccatctttcttttctttcaagtctccatcagactacacccagccttccaggattaaagtaagttaattaggcatgcattgatttgatctccgtaggtcccccctaaattgatatttttaggagttagaatattcaatgtgctccccaaatgctacgtaatagtggttttttgctcattttgatagggcttttagcagagtgaactgtttcgtggacactgtcacaggaagtggaaactcaccttgtgaaaaggtaagctttccatgggctttgagttttcctttcctcagcaggggaagggcctatatgtgttagtgttagctgcctggccttcctctggggcttggtttttaatctccagggaggcaaggctgacaaaatgtcatctatttgcctactaaggaaagaagctgtgaaatagatctccattgcttatgcacctcaagtcgcttagttccagctgtatccataatatcatggtgtatttaaaatactgctcattgcaatccttttgaaaagagattctgatgctcgtaaatactccaaaaaggcattaaggtgttacactgatttttatttttattttattttattttattttatttatttatttatttatttatttatttatttatttattgagatgcagttttgctcttgttgcccaggctagagtgcagcagtgagatcttggctcaccacaacctctgtctccagggttcaagcgattctcctgcctcaacctccctagtagctgggattacaggcatgtgccaccacacctggctaattttatatttttagtagagacagggttgctccaagttggtcaggctggtctggaactcctgacctcaggtcatccactcagcctcccaaagtgctgggattacaggcatgagccactgcacctggccgctttttatctttaattggatttattccctttagaaaacttaagtttgtggattcatatccaaatattgccctttactgatctagctttttctgctgtaagttctaggaaccttttaattcagagaggggtaaagaaaagagctagcatacactcaatagcttttatgttttggatgcttcataaatatcacctcatttggacccttacaagagctttgggaggcagggagctttagacacattttacacctgagtaacttgatcaggacattttgaaaaaaaggtttttgattatctgtttttcaacttgagagagtcgtgagataactaaactacaaatgaaaaatacgtaggtaagtctctttgtaaggtcatattcgtaaaggttgcaaaagagaccaaacaatgtattccaattgagaagtccaggtagagtatttggttcatttgtgctgctataacagaataccatagactgggtaatttataaagaatagatctttatttctcacagttctggatcctgggaggtcaaaaaacaaggcactggcagcttctgttgtctggcaagggctgttctctgcttccaagatggcaccttatttcttcatcctccagaggggaggaacgctgtgtcctcacatgtggaagaacagagggacaagtgaaccaaatctttgtgtgaaacctcttttataaaagccttaatcccatttatgaggggaggagccctcttaaaggccccaccacttaatatcatcacattggccattataagtgtcaacacctgtattttggaggggacactttcaaaccatagaataaagaaaacgaaagggggaaaactgcaaacaaatgtgctatgagattagatggatttgaaggggactcgacagtcttgggccctttgttttggaagatggattttgaaagttatcttttattgtattcctgtgaggcccatttgtttcctacccttttctcttgtccccctcttccttctctttattcagtatcttcctctggcaaatagcagttactaaatttggttctctgttatcttccaactcgaaaggcaaaaggcacaggcagtaccctcctggtaattatttatgatatttctccttccagagatttgccctatggcagcttcaatccgttaccatcactttttatttttttgcccatattggcagcttcccaagactttgggaggaaaaagcagatctgcagatacgcaaacctcaaaatcaagacttggttaatgaaatcactcctccacttgcccttgcctgttactgaatcctgttccagctgggatggaaaaagtgcattggtcatgctgtcaaaagcatatcacatttctccactgctatttccttccttcttaactaaaaacaaaacaaaacaccatagacaacaaatagacacacacacaaaaaaaaagacactaggtgagagtgaaggtagtttgtactattttcatttttcgtgtgttcaatcgtatttctctcagcaaatatgattggaagtggtgcttttccttccttccccaccttccagcattaggtttgtaggtgaacataaaaatacactgacactcaaagaaagagctctttctgctctgcacacatcccatctcgccctcttccttgctcctgcttatttctctctctttctgcctccttacctccttcagtttagagcttagagaagtttttcactcttcttttgacaggtgtcagatagacagtatgagctcatttaagctgaactgtctgggggaaactaaatttgttcaggagaatagcaatttggatgacaagtgccaggacataccagatggcacggctggagaaattcttatcgggctcccagctcacgttccaggcggcctctctgtctctctcctctattcttatttgttcatggttgacccagatggaaacttgaaatgcaaatgtatttcttcttggaagtttccaagtaaaaaaggtgatagtgactcagcataagatgcttacatgcccccaaaagaatagccagtacttgttatttatgcttattactactgatgcttcccagacccctgtgggcacatatttgaagaagtcttaattgtgagccctaaactgattgtgtaattccagttgtttactaaaataggactgttacctaagctgcaaaatatttgatgttcttgtcaggatgtgaatggaagtgttcttaaacattcttcctcagttgccacacagtttgactgattttgttggccctcactttccagaaagggaaccgtggacataaatgtcatgggaaggtatttagtagaaggtgtgatttttgggggcgcatatgaaacattctaaaattcaaggccagggcgctgtgacaggctctaatctatgaatcattatattcttaacatattctgagaacaggaagagaaagctcaacctttatagacacagatggaatttctcctgtgaagactggtaattcatgtgacatttgctgtttgcttttgtttgcagtcaaattctttctctcaaccttgcactgtgctgttactggtcacttaacagaccttctgaaagagcaatataagtttatattttaggtacacaaacaaagcagatgtttataatactgggcatgattttttttttttttggtcaatatttggttcacatgagaagatcaactttttctagcctgtatactttggctctgaatttacgtgttttgaaaggtttgttgttgttgataatttagtgatgaaacttactcgtggaaaaggcttattgtgagtgaataaataaatagtataggctaaagtgtgtgtagcctacattatttggtagtgtagtgtacactccacatacttttatcattttaattttctactaaattatgcatgtcctggtattaggattcccatagtcatggcaaaaccaatgatggtaacgccatacttatctggaggttaaagtttcattaacaatttaaggtggaaatcagagaagaaggcctctgagccagcctaatagctattctaaccccacacagcaaggtagtatattgtattgctgctcttctcaccaagagcttctgggcctttagcacattatttttaacatgtttaaatttctgggttttgtggacacatcacattagcagatgtgggaatgatagaggttattttgacatacagagaggagacaagaaaacggaagtgtaaccacaaagctgggttgccacatcctatggaggtgtaaattcataaggataacattgagtcacccagaaaagttgtattgtgtcttccttttaagaaacaatgtgggccgggcgcggtggctcacgcctgtaatcccagcactttgggaggccgaggcgggcggatcacgaggtcaggagatcgagaccatcccggctaaaacggtgaaaccccgtctctactaaaaatacaaaaaattagcagggcgtagtggcgggcgcctgtagtcccagctacttgggaggctgaggcaggagaatggcgtgaacccgggaggcggagcttgcagtgagccgagattgcgccactgcactccagcctgggcgacagagcgagactccgtctcaaaaaaaaaaaaaaaaaaaaaaaaaaaaatgtggtggaactaaaagcccagtaaaagtgtaacatgaaaggaaaggctatgttatattcatccaatagggtgtgtgtttgtgtatgtgaatatgaagaaatttatcataaagaattggttcatatgattacagaggctgacaagtcccaaaatcttcagggtgagtcagcaagctggagacccaagtgagctaatgctttagttacagtctgagtttgaagcctgagacaggagaactgattgtgtaattccaatcctaaagctagcagactggagaccaaggaagagttgacgttttacttcaaatgcaaaggcaggaaacattcttcctcaattgccacacagtctgactgattttgctggctctcactttccagaaagggaaccatggccataaatgtcatgggaaggtatttagtggaaaatgcaatttttggggtccatataaaacattctgaaattcaaggcttgatatcccagtttgagggcagcagggcaggaggaattctctcttccttggggagggtcagcctttttgttctatttgggctttcagctgcttgaatagggtccactcacattgggaaaggcaatgtgctttgctcagtttacaagtttaaatgataatctcttccaaaaatgccctcacagaaacatccagaataaagtttgaccaaatatatgagcaccctgtggcccagtcaagttgatacataacaatcacagccatccttccagttagtcacagaaagataccttcctgcatctagacaacaggcagctgctgaggagggctgggaacagcagttcatgatctggtatcagatcatgaacccaggggtccagcacaaagacgtagatccagccctgataggagaatgcctggtttttagaaatagggggattagcttccaaactatagaaagaattcattcatccattcattcattcattttaaaattcaggtcttaattcaaatatcacttccccagggaggcctttctgatacattgtctacagaagtcctttcagccgctctcatttattcattcacgaaaatgtatcaggcctaccctgtgaaaggcactgggaatccaatagtgactgtgaataacaagcaaggtcccttccctcacgcatcttacttactagtggggacagacagaaactaagtaagcaaataaagaaggtaatttcagatagtgataaatgccataaaagataaaatagggtaatgcattagagtgttgatttgaggacagggggaagttacactagatacacccgttagggaagacttctccagaagagcagtcagcttggattgaaggatgaaaagtaaaagctccattcagagctcttggggaagagcctcttaggcaaaaaacagctggtgcaacagatcaacggacagaaccatttggccagttctgggactgaaagaaagccagtgtgactggaatacactgagcaagggagagaaaggtcagagaggtgagcagagaggttggcagggcaagatcttcatggaaggtcatataggccctgattcagagcttgcattttatcctgattggaaataagttttaagcagaggagtgatatgatctaatctgtgctttgggaagatcactgcccagcgggacacagattgtgtggagcaggaatgttgtaagaagtacagacatgtaggaggctattccaatagtccaggtgagaaattacgatagctgggctagggtggtagctgtggagacagtgggcagtgggcaagcttggctgttctgtgaaaaagtcttcaggaattgctgatggtttggatataaggggtgagaaaaataaaggactcaagagtgactgctaggttttattttcttaatggcacatatttttatttgaaattatcttgtttatttgtgtacttctttactgttgatctccctcatcaggctgtaggtacagtgagagaaggaatcttgcttatcgtgttcactgcctcagcctcagtatccagaagagcacctgttccttgaatgtatgtgtatataaatattgattgagtacttagtatggaccaggcctgtactaaggctgagatacagaggagaacaagacagagatgacccatacgatcatggaggctgcattctggcagaggagatagacaataaacacatgaactgagttgtttcaggttttcataaatgctgtgttgacaaaaggatgaagagagtggttaaggaaaaacctcttctctagtggttctgttattctacatgtattcactagactctaacatctgtgaaagcaaggactaggtcttatattcttcgtgtagtgctaagaagatagtatgtgcccaggaaataaaagtgggcttgtcaagcctggaagccatgctcagttcctggagcatcctcagtacctgttttgttatctatgtgatgtgacctgctagggaaattgtccgagtctctcctttcttgtgtaggttgacaatgcctagacccatcagtctctgcctggacaggcctgtaatttaactgcctgcctggctctgattgctaataggcatgggtagccacctatggatttgcacagccacacacggccttgctgcaaatttagcagcagatagtgcctcaaggtcactagagaagaaatgaatctgtaaggtgaataaactaaggccaataagcatagagtgccagaaagtagtgcccagagggatccgaggggcatctgcatgtttattaataaacaaacacacaaaaacccccgcctcctcctctacttaaggaacacagtgagatctcctcttatgaagtcatttctcccatgacttctgctttgaacagaagattttcaaaagagctttgtttgcccttaagcagtcttatcctcagataaggataaacgatcagaggaaaatttcactgggttgttggtcagctatcaaaatgaaaaatgaaaaatctttcttaactggagtaagtgtggaatgcttgaatagtgcagcagcttttagtcattcttttacaactgctgtacacattgcagccagaaaagacattttagttgtcaggtagtcaataaatatttattacctgcttcctgtatactggttctccactgggaactgttcctaaaggtttgttttcttgttacttttcttgtccctgtgttcctcataactcaaaactgctgacccatttaggaggtatgggaaagcaagattgatcagaaagcagactgggaagagacaagtcatgataattcttatgctgtcaaaaactgagtttagcatcatgctaagcaggcagtattcaattcataattcaaaactgagtgtcgcagtgaatggggccctgcaaagtcaatgtctgattgttttcttgctgataagcaccatgatcagaggtctcttcactttggcttaaatcataaacatgtttggagcacctaccatgtatggccactctcctaagagtgaggtaggatattgaggtactcccagtgtagtgtctggcttctggggactcagtgttaaatgagtgtggagaagatgtgtatatgaagactgtgtcttaagggagaatgtactaagggaaatatgaagtctggtaggtacacaggagaaggagatattaatacttcctggggggaatccaggccttactagagatccttctgcacactgtcccccagctcctcactttgagtgtttcttttggattattcattttctctatcttgtggcaggcctcatcaagactggtatgtgcatctgtgtttgcttttatcagataatcttctacctactttgagtttaccttctatttctaattccttgcttaacttctgggttccttgcacagcagcgtctgatatcctgcatgttagttctttgttttccctacccaactgaaaattactaatgcaaaattatattagcaaaatgggcataaccagaatcaccactgctggggtagttaatgagcagaggtctcccatttgcttcctgcccaccagtctctctcctgccctttcaaggcagacgggttgctggctcactaatttcccacatattgcaatcttttcctgtgatgcagaaagctatgtgtatttccccactcctgaggtgactgaactgtttaagtagttttgataattcgttgctttaaaaaatacacaaagatttgaataatatagataaatgttttccttgactacccacaccaccctattgaggtcagtattcttagatataacgaacaatgtgagtttgatctatattcttccagactttgttcccatgcactgacatatgtatatgtgtgtgtgtatgtgtgtttgtgtagttttgtgcttttttctaacaactcagctgccaaatgatcagtgcatatagcactacttcattgtttttattctcttgagtgtcattcatgtatttctaactctttgtatgcctaatatttttttgtttgaatgccaggcattgttttaaaaagctattgatgctccataggtttacctttcctctactaggcagatcaggttgaaagactgattgccttaatccaacaactgactaagttgcatcagaacaggttgcaattttgttaaattactttttgttctccctatttcagaagcatggccctccagggcttttgattgtaattctttgtctcctcagcactaagagactgcagaatatcttgtctgcttttgagagatttgggcttagctctttagtcttctgtactgtgcagcttctgaacatgacaaataacttgacagggagaccaactctgtgttcaagtctcctcaaatcttcaatttaaccactgaagccgtacatggtttccagaggatctgctggtttctttgtcccagcagcttccctctgcctgaacctaccctagattccattctctagaatgagccagcttagggtggcaagtgtccctgaagttggctgcatgtcctcagatcacctctgaaatctttcctttctataattttactgttgttagaacttttggcttcattaactttctaatgtccttaaatatgtgatttttataatttatttaacttttctagttgtttttagtgggcatgttggcctgccatgaacaacttcattatacttagaagtagaacttctccctcattgcttttaactccttcagattctttcattgcatgatgtctgtggcttatttggccatttccctgttgatagacatgctgatttttatttgtcactgttacagtcttataatttaaaatgaagtacatacattttgtgtacttatttatagcaattactaatatctggaatttctggatttaaaatatggatttttaattttaatagagattaccaaattgttctccaaaaagacttaaatttaaatctcaggggctgaggcttccctttaaataaaccaggtctatctctgatcttataggttggccctagtaccaaacagttctactagtaacattgagagttctatgaactcttttagagactctgagcacactgaaagcttacctgctgtgttgtccttgccactcttacctcagtgctctcctgtgggtacatttagtacctttacaacgtgtgcagtgatcatgccatggattacaagagtttaacacattttctaagacaccaagtgagtaatgtagatactgaggagatattcagtagaaaaagccaaatcactaataatagcatattttcaatatacaggcaatttctcagttgaaaagcttagctattattgctatggccatggcttcaaagctgtgaggttcgctttttatttatattggcaattttcccatgtgcttataaaaatcagtcctttggatggttcactcagtgtatttgaataccttttccaattctctgaagctccttgatccagtaacagtttctttccttggcagaccatgaggagtgggaaagtagctttttctaagtaggcattgattggcattgagcagtgggaaagattggagctggtgaacatggggtgtgcaaatgtattcagccaacaggagctcttccagttcatagggtggatctgctggaatagttgccttggttctcctttcacttcagggtggaattaagctcctggctcaatagggaggaagcaggataagtcttagcctctggacacttaacctaaaattctaaagaaaaattccttattccttttttccttttcaatggcttacctttaaacagcattaatatcctgcctgttgtactgaagcaagaaactgtagtatctattttcaaaactagtacatggattttcaatgtgagtgtcttggtaataaatgctggtttattttgaatttaaaaatgtattttgattttgtactgacagtttaactctttgaaatataacggaggaagggtcagaaataaagcaatctttctttcttctggacttatttattcactcttctttaaacagttgttaaatctctcttatgcatttgacattgggctttgcactagtgatagaaaaatgaataagactgtgacatcttttggtactacatcatataaattgtctagattgtacttctaagccagcatgagcattttagaatataagaaatagaaaccaaaccaagaaactctagttcggagcaaaattatatgcccagttgtctaagaaagggctttgctttttaccagtaatttagaattttatgactaagacaaagcagaaaattgggaagaacagtgaaaagggcaagaagttaatggagtgcggtcagagctgagaggacaaaatctaaatgaaagggggaaaagcaataaggattgaggaaggttgtttaggtcattaagcttacaagatcttctatttcccaattagtacattctgaccctgaagacgtttaagtacatgacgaggatgtcactggagtgtgacaaattcttcacattctcacttccctttgctaattctggcgtcagaagttattgcagagaacatagtcaaccgtctgtggagatacatctaaaacagatgtgcctattgttaaacaaacatggtatgtttaaatccatatttatttattaaacaaaaattagataattactccgattatctggtacccacagggatcatacaaatgacaaacacaaagggccagcactctgagaatgagaagcctagagagaggccaggctgggatagtgccaaccctgacataagatagaatataattaggactttaaaggaaatacaaacaaatattgtgggcactcaggaagaaaagcacttttggtggttgtggatacaggtagagggagaaagcacaaacaactcagagaaactttcttgaaggagatagtatgctaactggccatggaaaattgtttgaatatcaacaagtgatgggatctcaacagggataaaggatacaggtgtcataggtaaggtagtggcataagcaaagccatgaaggaggacagcttgtttgatgactagcagtgtgtgttataggagatggggtggaggatgcagagaaacaatgtattttgagaccacacaactatgcctttaaatcccagcccttccgcttatgcatacgggaccatgcctaggttgcttaacctttctaaatctcagattactcatctttaatatggggacaataatattgatttttgcatttgtgtgtgtgtgtgtgtgtgtgtgtgtgtgtgtgtgtctgggagagagagaaaggagagagagaggagagaaagactggttataatctatgtaaaccttctggtgctcaataaatggtagtaattattatggcaagtagttaggctatctcaattttggacaatgtgttagataaaataaaaaaaataatttgtgatcaaattttgggtgatcttaaggagctagtttaggaatatggagttactttgataggcattggaaagccattgaagacttttgaccagggaatgatgtgattagggcttagaattgcagtgctgattctagatatattgtagagctacgacataaaggattagacaattagatatgaaccatggtgtcagacacctacatatctgttctttactctcttgcagttataaaaaccctgatttttagctggaaacatgactgtctaaaatgaagaccctatttacctgttttgcttgtggctaagtgtgcctatgtgacgatgttctggccagaagtatcatgcagtagcatacctaaaagatggctggcccaccttcttctttatcacttcctccatcctgcttcttagattacctgccatcttggtctaggtccagctgctaatttggaccctagcaatattggagggatgaactggcaggagactgagtcccaaagaacttcatggaacagaattctgccataccatcccttgactaaatttcactagccttctacatgagaaaagaatgaactaccttgttgaagcctctgagattttgagattctgttacatgcagttgatcttacaatctgattctaaccaattcagatatggaggaaataaatgaataagaacttagtttctaggatttcaagccagtagccattataggaatataaggaaacatgtttggagcagggggaggatgatggttttggtttgggattcaatccaggtggagatgtcaggtaattggaaacaaatgtcaggagcttggaagagaggccagagttggaggtttagacttggggtgggaagcaggactttaaatagctctgatagttgaatgtatgataggggaagacattttcaagggataaaagtataaaaagagtgcaaaaacctgaaggctgaccctggactaagtgtctgcttatacaggtgaggaggcaatagagatagtgaaattgggcaggaagaggtgtggtgaaggtgagggtaaagggaagaagagttgaggctgaattaatgagcttatttcttttgcatatggcatgtaggagaggaaaaggattcctaggtttctcatagtcaagaatgtactgattatatgcatttgcttcattaatgaatacagtgctattttgtttagtgtttcaggaaatgctttgattccagcattgttttccgcttttaatgcttggaaacagctttgctaggctcttctcaggtgagtagctgcacgccaaagtgtctcagtgacagcattgctaaggagttttatggagaatggatggtcttgactggaaagtcacttaatggcttttaaagttgtgagcagatgatcatactgtataagtgacagactgtgaagtctgagacctcatgaatggttttgatgttggcatcagataaaattactaacaaattagatctgacatattttaatggtatgtataattattattggtctttgtgattataggctacatagtaactgctatcactggtaatagccagtattacttttgtctggacacacaccagacatttacggaaatagctggaagaagaatgatattgagaattgagggagagggtggtttgtgccaaaaggaaggtttggaagaggtggacactattcctctctcacttcctaactggcttattctggagttggaggcctgcagtgcctcaccctgtcaagctgacctaggcacctagtatgtttagctgttccagtccccactctccagatttggccacattctcccagttggaaatgatggaagatattgccatctggagttctctgatttcctgtaagttcttggagactttatgcatggccccacccaaagcttttccttcaccccaacaggagagaaggaggctgcagaccacagaaacttcagagatgatgatttatgtggactcatcagaagtctaaaggggcatgtctgtgttcttaaagggtacgggaacctcagagagccaattggcccaagaagcagtatgtagaatggctacatattctatattttcaaagatcaaacagtgcagagtgcaagattataggaaacccaaaagggtcacaaaccaggataagaaaatatcccattcactgccatattttccaaacctaaaagagtgcctcaatcaatgtttgttgagttttaaataaatatctttatttcagtaatatttaaaaatgtatcctaaatctacttgttgtctgtattttcaaacatagggaaataagcaccaatagctaattggaggaataggatgggggatggggcacagcatgaggagaggagtgagagtatgtctctcccagaaaacatttattgtaggtattgattcaaattccagttcctttcattcctagctgtgtgatactggacaagttacttaaatttgagccagagtgtctccactgttaaactaagtaacaatatctactttataagattattgtgtaaagtaggtaaaatttatgagaacatgcttaataaattctaagtgacaaaatgttaggtgttattactgacatttataacaataataataataataaaataataaagattggaacatggccagggagtggtgaggggtcatagcattggtgtgaaagttggatttgaatgtcagtttctctggctcatatggtaactctgcctatccaggatttaacttagaatcaacagctccccaaacaacagcagagctctatccagtttgaacacttgaactagttcttttactcagtgagaacctgtgagtctgtctggagtagagaggcgggtgttgagattaaaccaccacagtgggctgtctctgtcttagggaagaataacagagaaggagtttctgcacaccagtctgacttagagctgagcagcacatagacgtgtacccaggtatctcatgccttatgcccagcgggacccttcctggtgtgtatggtcgatatgctaccctgtggagggtggctatttattgaattcctattccactcaacttcagtttatctgactttggaggggttgcaacacggccttgcctcttatgctgagctttctttggaattgctatgtgactgtttctttgacagacttagttagaaattcagatgatactgatttaaaatagacccgtggggtttgagaacagttagagagagcacagatgagaaggagaggttaaattttttctaaactcaagttgtcagtactaaattcattatcccccattaacaggcataataatgaaaataataatgtataactttttcactccattcactcatttattcatgaaatatttattaagtgcctatgtactagagtgtatactaaatgctagacatatatagataaatagataaaccatgcctgtcttagggagtaaggtggaaagcctgagggtggcatgtaggttagtctggcatataatctcaacaagcttttggaaagatgaaatggttgtacttagaggcagaaattgcattggttttggtcacagatgtagcctacctccattgcctgccacagaacctggctcagctaagtacccaatagatgttttttgaattggcttaatatttctaattgcatgattaagtggccagaatcagttaatttaacccatgagtccttttcactccttttacagagctagaaactttttgtggccagtcaacctggtaaccaaacatttaaattctggtaattggtaaatatgcctcgtcacaggtttgttgaatgatttatttttcataaaagcaggaggttcatgacaagctcagcaaatctgttggcagttttaagacattataccgggtagtttagggaaatttctcagcacatgagaccctttagattatgtaatattcttgcaaggcaactaggaaaaatagtttttaaaattatgtctattttgctatatttaaaagcagaaattatcttattacggagaattgattaaatatttgatagcatttttgtatgatttaacatatttataggtgttaatttctcacaaaatttaagttatagctctaagtgtagaattaatagtttccctttgattacagtttttttggtgttaacgttcatctatttttggatgatttgacttacccttcctttttaaaattcagactctaaatttaaggctatacatcaccatagtgtttatgaagtgaattaaatcttacagaatgttccagtgcaatctgaaactacagcaactacttgaggttttatgtctgaaaagtgttttaatcagtgatggatttggaattattgcagctgattcctgaattcttaggcctaggccttaggaacacactatccagatgtttataaaatgccattttaccaatgtcctgtttatactttgactttgtggttcaaaaaaaatacatttgcctacttcaaagtaccagatgaaagtattttacatcaactaaatactgcatttgagctgcccaacagtccctaacactgactccttctgccttaaaggcatttatttcctatcatcacctgttttctccaagacatgtgagaagaataaagcctgtattgtggcattttgtgtgaatgctaagatcttggcaatgtttcttataccttccctagctcttctattttccctaaaaagtattctctttttgaaagaaaaatttaatttctcaatttcttaaaccagattattaattaaaactgcaaaatgaaggaaggaacacccactaattcttcaaagctcagcaacagaatcaaatcctttgaagatctgtctgcttaactcatcactattaatcagtttaagactatttagaaaaggtactgagagaaagaaatgaataaaaatgggtgaataaggcaatattaagctgacactttatagtccggttggtagagtaaaaaagcaatcaaacttaacagctttttaaaaaattaagaatgttatataggttgatgttatttttattattataaatataatatttactccttttgccaacttggaaaatgtagaaaagtcaagaaaaacataacattcatccatgatcccaccacccagacaaaaccacttttacctttcccctattttttaagtcattttttgctatgtaattaatcaatttgcataaatacaaaattgaggtaacggtatatgcacaattttgaaacatgttttaatcactttcttgtggcattaaatattcttcaaaatatgtttttagtggctgcagagttatgttatgactttctcatcctttagttggtctttagtgtgtttttatggtgtccagtttcagtattcatgttgatctcctttcaccctttgtcttcactgagtcactcttggctcactatggtaatcattagcactggtttctagatatttctggctcttcacctgcacataaaacagggctgtacatctcagtcccttggagtttgggtgaggacatgtgactttttctaaccaatgagatgtgagtagagcatttaattactgatgagagagacctttcagagtgctgtcctctttgccacagtgactggcagctttccagagagtggctgctccattagcgtggatcccagagtgaggttgaggccaacataaacacctaattggcctgggatggataggtaatgtgagaagaaaatgaaactttgttttagtgagtgaaatcttaggggctgtttgttatcagtgaataagtttgcctgtcttaactgataacaccaatcatttgtatctagattgggaatctgatttagaccttgtggtcatcttatagactcatgttcaccttcacatctgtaaattatgtggcaggtcatcatatacactttctcaaacaattggggaatctttgcccctatgcatctgttttcagggtgtttctttagttgacttcaggcgtattcaataactcatatcatatacatacataaacactcataccttcattctcacaatgtttatgattagccttgttcatacttttctgttgcctaggaaaatgtcaatagaaattttaaagtaaagactgattttttttaaagtataaacttagtagttatatgaaaatgagaaaattcataaggaaaaaatcctgtcatttcccctgccattcaaacctatttttattatcccatatttcctctattccctgtgtataaaactttatattgcttatcatagtttacatacaacttgacattttctatatatataaaaattttcatgtttttcctacacttcataattaacattttaatggctgcaaaatattccactgaaattgaacaccgtaatttatactacaatttccttattactggttttttagtttgctgcaatttttttgaaattctgttggaataaataatttttagagcattttaaaacaaatatactagaatgtatacatctaatcagtattatcatataaataacttctaagtctaaacacatattctaatgcaggtgccattgatataaacatttctaatctcttttaaaatggtctttatggccaattgatgagctacaaattaaaaattagtctcattattttataatatatcttgatttggaccccaaatcattcattcattttgttaatcatattttggctgttttcaaaagttaattctaattttaaagcaccaaattttgccttcatttagaccatttggaaggctgccaaatgctctaaaggcaatttcagaggaaaagttccaaaactgttaacagcactgggcaattgctgcgataactgagcagcctaccatagtgatggttttagagaaaaaaacactcctttttaaatgtgagtttgagtggatttgttactgtaatcattaaatccacaactctatagtcacactgggcatggatgtaatattgttcaaaataaatgccagttgcttgatagcagggactgattctttcatgacatctacattagtgccttgcacatggtaactacttaggtatatttgtgatcgagtctgtgaaagtgatccctgttgagatcacactttttccattggcaaggacctatctttgaataaatcctttctgctggtgaagtcttgaagtctccagcactctagacttacagcattagcattatgtgggaatttgttagaaatgaaagttctctggcctcaccctggacctactaaatcagaaattctagagattgggccagcaatctgttttagcaagacttccatgttattctgacacataataactaaatggtaaagttagcctgaagaaaaactgaaaataaaggtcaaagaggtgattctataatgaaagaaagttggtgttagaagccacagactagcaaaattcaataaacatcttcagagcacctactgtggtccagaaattgagcttgtagatactaggtatgcaaaagcaaaatagatagtgtctatacagaagacataaatgtgcgtaaatgggtataaaataaatacaatgctgagtgatacttcgatatagaagaatatacaaaatatgggtggtgatgatcataactaccatttataaaccacatgttgtctgtcaggcacagtacagtgctttatatatatatttttttggtatgattatcagaaggaatataaagattaaaaggtgctgcattacttaaataggttcccttaaacctggaaagaataaaatcctggtcacaaagttcatttcttgcccagagcacttgacccattcagggatcctgtgtttgtcatttctcttcagaaatgattatattggcacctatctcagaattgatatacagattaaatacggtcatggatgaaattatttagcccactatgtatcatcaatattcattagatagtaatcatttttattgctactaatagtaatcatcatcatcattagaggggtgagcggcaatataagatagattctatagaggttaaaagcatgactccagccagattcagattgccagggttcagttctgtctttgtcagcttctagctgtgagactatgggcttagcctctctgtttcaattttgtcatctgtacaatggggacagtaagagtccttcacagggttgtaataactggtaaatgaattaatgtgtgaaaagcacacagcacactggcaggcacagggcaaatgctcagtaagtgctagcttggagtgttctgtcaaaaagcctaacatctctttgtggtattttgtgatttttgacagaatggtgtatgctttaggcatctatggaacaaaaatatcacccttccttaaatctgtggcgttgagggatcactacatatttgaataaaggcctttctctgatgtctaacaggaagaagaaaaccactgataccaaactaaggtttaaaaaaggccaaggggaagaaaattttaaatcaaaagtcatccattcttatttcatggaaatacgttatttaagcaaatatactgataatgatgcacagatgctgtttgtatacattactttcctcctttgaattcactaagtactgatttcttattggtgccagcgatcttcagaattagttctgtccccttctgtatcattgtgtgagacaaatatctcatatacaacttttctaaagattagaagactaaaatatgtgtctattgcctcaaaggcagagaagaggtacacaaatgtgaataaacagttaaaacattaacagatgtattggaagagtccttgaatacacatgtgattgatatcaagaaaacattagctttgtaattctgcctagatcgaacactgatgggctggcactacagaaagattcagctgcaagtatttcatgtaactgatggtgtaacgcaaaaacatttcagtagatatctttctaataatttgccacaggtgctcaaatgcctgggagctagaatttcaaggattcaaattgctactgtgatagcttcaggctttgcttccaggtttttttttttttttttttttttttaagcaggctgtggcacatgtttttaagaatttaagtctgtttattggtgatgctgcagtttgcttgattacagtttaagagggtgactgtagtttctcaaagaacccaatgaatatgaactcagtttacatcattgaaaactcatgttcaatctctatcctgtgtgtactgtgttcagttattttctttgaacttaacattatttcatctacatttctatgtactgctttcgacccatttacgtgtcatagatgtcttctcttttgccacttcctctcctgaagtttctgtcctgggtttcttctagagttcaacgtatatatagagatgcagagaacatcttagtacaaattattttttctttttttacgatattggcgatgagtttgttctccaaagcaaaataaccaaaacaaaatcagaatttttataggtttgctgcattttgggagatcacactctagaaagatcaaactaatttaagtgccaccagcattggttatacagattgatcatcccttatccaaaatacttgggatcagaaatgttttggattttgaattttttcagattttggaatacttacatgtacataatgagatatcacagggatgggacccaagtcttaaacatacagttcacttgtgtttgagatacaccttatatacataacctaaaggtaattttatgaaatatttctgataattctgtgcatgaaacaaaattttaactgcatttttgactgccactggccacagaagtcatgtggaattttccatttgtggcatcgtgttggtgctcaaaaagtttcagagcatttgggattttggatttttggattagggatgcttaaactgtatgtgtaattttcccatagcttatacggtaccagatttttattataatttaggtgtgtaataacttcttacagtaattttaatttagatttacttagttggtaggaagttatatatctgtgagagaaaattcttaatatttataatttgaaaatatataatgcactgatttatcattttggtcatggcaaacattgggatatatttgtctgcaaataaaagaaaactcgactaatggtggttgtattagtcaggactatccagagaaacaaaaccaataggatgtgcaagtaagcagaaattttaacatacggtagaattaaattggaaaggaaacaaggaaactcatatattttgtgatgtttactatgggttacagaatgtacagtaaacacaaaagctaatatttattcaatactttctagctcacaaaacattaagtgtaaaattttagctattttaacttttcttttatctttatttcacaggcacttacctcctgtatctttgaatcttctttatatttttatgtttaagagaaaaaagccaaaagtccttcctgtatggtgtggatgttaaataccaaacagttttattccccttaacattttgaccatcttccttcttccttgcactcttgtggagttggctgctttcctttactttggaagaagctacgtttttctgaccctgtaatggtgttcttctgagatttgcggatgaacataagatattaaacatatcggttgagttttgttcatgtggagtctgtcatcaatatggaatagaattcaataatttgactttttcttgcctctcttctgccatttcaaatgaatcataaaaattaggaaggaaatttagtcccatctcctctctcttgagcagatttcttttccttctcttttttttttaaacctgtgggagttgggaatattttagtgctccccctttgtgaattatggtgtaaatgaaactttttgcttttgtgttattaatgacagtttaaaagtctgagatggattttctcttattgttgttaatgacagtataaaagtcttaggtaaatttactcttaaggtgctaaattaaaaaaaattaataaagtcaattgaaaattttccaagagttattttaaagttgatttttaaatcaaataagcttttctattaagcaaaataagtgctcttttaattagaagctttaaaaaaaactctatggaaacaaaagactataccttcaaaagctcacaatctttacaattcccacttccagacctttttttaggaaacattccaaggctttaaactatttgtgaataatttttatcttagtcaatgtgttatatgcccctgcacagacttatatattcttcattgagatatataattgtcctcttgttggatatttaacctataagctgacactcactttcaaggattgatttgagctttgcaaattttgaaatgctcagaaacataaagtgcttggtatcttttataagaagctagtcagaactgcctgacatgaagggagtttgattgatgtgtgataatcaggtgggaaatttcaaacttatttatttaagcactgcatttattttatgtagatcaaaggaaaatattcagctggcttcaaatgatgtcacttttcataagatacacaagaaatttgatgaaatttgaaaaactgattaagacttatatttgttcatgttcattttatattttgggtgtactatcttgcaagcacaaacaccagcaggctttgcttttacacatctcataagccaagtccatggaagtataaatttttaatgagatagatactaggattctctccttaaaggaaaattggaaacttaggattcttattttgacttttataatagaagttctatttgggatataattcagacacaataaaatacactcctttaacttgcacaactctatggatttagtatattcacagagttgtgcaaccaccacaactaattttaggacatttcatcatcccaaaaagaaacctcatacctattaatattccactctcccctgccagtcctgggcaacctaaaatttactttctatctaaaacctaaaatttcctttattgaatttacattctatctagatctgcctgttctggacatttcatacaaatggaatcttgcaatatatggtcttttttgactagcttctttcacttagaataatgttttcaaggttcatccatgttgtagcatgtaccaaatgtcattttgtattgctgagtaatttcatcatatggctatactgcattttgtttacacatttatcatttgataggtattaaggttgtttctaccttttgactattaaaaataatgctgctatgaatatttgtgtgtaatatttcttcatgtgggcatatattttcatttcgttataatatataccaaggggtagaattgctgggccatgtgataagtacatgtttaactttttgaagaactgtcaaattgttttccagagtaactatgccatttcacatgcaatgtacaaggattcaaatttctccacatcctccccaatgcttgtttttatctctttttggtaatagccatcctattagatggaaagtgacatctcattgaggttttgatttgcatttcctttatagctaatcatgttcagcatcttttcatgtaattatagtccatttatgtatcttctttggagaaatgtctattcaaattattttcccgttttcataattggattttaaaattattgaattgttaaatatctttatatattttagatacaagtgccttatcagatatatgctttgtaaaagttttctcccattctatgggttgcctttttactttttgatggtgtcctctaaagcacaaaagtttaacattttgatggttccatttatctattttttattttgttgcttgtgattttggtgttgtctctaagaaacaatttcctttcccaaagtcatgaagttttgtagttttagctattacatgtaaggctatgattcattttgaaattgttttgtctatggcatgatttaagaatgtaactttattcttttgcatgtggatatctggtttgcctagaaccatttgttgaaaaaactgttctattcttgttgaactgtctgggtatctttgttgaaaatgaattggccattcctagaagggtttatttctggactctcaattctactctattggtttatgtatctatccttataccagtaccatgctatcttggttactatagttttatggtaagtttttaaatatggaagtatgagttctccaactttgttctttttttaaaattctaacttgttttgtttattttgaatgatttccatatgaattttataatcagcttgtcaatttctttttttaaaaaaagcagctggaattttgatatggattgcgttaaatccataaatcaacttgaggggcattgccatgttaacaatattaagtattctactttatagacatgaacatctttccatttatttagatctttaatttattttaacaatatgttatagttttcagtgtacaggtttcacatgttggttaaatttatttgttctattttattgtttttattatgaattacatggattgcttagttaatttaattttcagattactctttgctattgttttgcttttgcatcgttcattgctgctgcacaattgatttttgtatgctgatcttttatctgctaaccttgatgaacttcttaattagttctaatcgttttgtgtgtgtatgtgtgttccttaggattttctatatgtaagatcatgtcactctttctagaaatttggctttgatattaaaaatacattaatataaaactaaagaattagttagaataagattttgttaaaaatattaacttactcaaaaaaaaagatcatgtcatctgtgaaaagagatacttttacttcttcttttccaatatggaatttaaaaaatttttttattatttgattcctctggttagaatctccagtaaaatgtttaataggagtggggagacaaacatccttggcttatttctgatctcaggggaaaagcattcattcttttcccattacatatgatgttagctgtgggatatttgtagatgctttttatcagattgaggaagttctctttcattagtttgattagtgattttatcataaaaaagtgctagattttgtgaaatactttttcagcatctgctgggataatcatgtggtattgtcctttattatattaaaatagtatattacatcaattgatttttggatgttaaatcaactttgtgttcctgggataaatcccatttgtttgtggtatataatcctttttatatgttgccggttctctttgctggtattttgttaaggatgttttgcatttatatttataagggatttttggtctgtagttttcttttcttgtgttgtgatgcctttgtctggttttgatgacagtaatggtggccttgtagaatgagttgagaagggttccctcctcttctattttttgtaagaatttatagaggattgttattaatctttaaatcttatttagattagttatggcttccttggtagtttaccctttgcttttataaattgcagaaggggcttgtaaatggggacaggacggtggtgtttgtgctgattggtccctttacaataattttactacagtgaaagtagaggattttaaataaaactgagtcttcattttgcctccttctataaaacaatgatagatgctccaccattggaagacatgcttagttgcagaaacaaattcaaaggtttttatatcttaaattaaaattagaagatgcctttcagtgccgtctcctcagctgagccatgggtgcatgcccggctcactgtccccactttaagaagtcttaccagtaacctataagtacaaatctgtctagaaacactacttaaaagagcctgttaagaagtgttatactgaccttctcttgggtaagagcctaagaacaaggagagtttgttgaatcccagacatcacgtaaggtaatatgaataataaatatttagattgtcttcctacatgttgcaaggtaatttttggtcattaatcactccactagctcagtgggaaaaattaacaccaaagaagtaataacaactaatttttactaagtaattactatgtgccaaacactgtcttaaatcctttatgtatactatctcttttatttttcatagcaatattatgaggtcaatgctaacattattctccactttacaaatgcggaaatttagaaacaaagaggtaatcttagttgcaaagaatgctggagctgggatccgacctaggttaagtgaccccagaacctgaaccagaatttggaatagattatatgcatcccagggatttagactcagggtctctgtattccaagttctgggtttggaagataagtctttgtactccttttgatgaataataaaatttgcagtccaccttttcttttctttttttttttctgagacggagtctcgctctgtcgcccaggctggagtgcagtggcatgatctcggctcactgcaagctccacctcctgggttcaagtgattctccttcctcgctatacctgtaatctctggggattacaggcatgtgccaccacacctggctaatttttctgtatttttagtagagatggggtttccccatgttggccaggatggtcttgatatcttgacctcatgatccacctgcctcagcctcccaatgtgctgggactacaggcatgagccaccatgcccggcttgcagtctactttttagaaatgttcatagagggtatactcagatggtactaatcacttgagattagacagtctctgcagggataattgaataagcaagttaataaaataaatatttaaaatgcattgagtgattaatgtgtttgagggtaagtgatttagttgtataattaattatttctgcaaaataactctatgaaatggtattattatcacttccatttgtagaagacacccctgaaacaaagatgtgggtaacttgccctgggccagttagcaataagcccagatttgaacccaagcagtcttgttccagaccttctgtttttaacaattctacattgcagtttctctaagtaaatagtcacctgaaatatggctacaacaatacagtcacaccaagaatgtagttagagataagaatgcatcattgtgtttgtgcatgtggagactggagctgcttctataggagataagcaccaagctatcatctgttggagagaaatgtgttgtgggtgaaaggaggaggagggctgttctgtaaatatgagacaagctgaaacaaatatagaaatatgaaaagaaaatctgattttcaaaagtgaagtttttagcctatgctttaacagaagataggaatagactgtggcacgcacttggaagctgtgacagtttggtcctgagagcactgtggtgtgggagggttaggagccacacctcaggggtgaaaaggaacagtttgaaagggcaattttagaaaatgactttgataagctccattagtagatacagaggttgaatcaacagattaatataggcttcaattataagtgtttctatgaatataagaagcatctagaaattaacaggaaaatatctgaccagttgggatggtatttctcctttagtgccaaaagtataatagtttttttttctcttgtggcagtaaaattaaaggcctggatttattcagcaacttttctttatgagaataggaatatattcccagacattgttctacacttttcctgcgtggtgttctaccaccaatgtggagttatagatttagacctctgtgtttgggtgggaagagagtaggcccactggcaggcagtaaccacagaactacatgtatctgggccagttttattccagacatgtggatcttctggtctgcagccttgacaaacttcagagttcccttgtctccttgtacagatgtgtgtaccttttgatcatgaaggcactattaatgtccttcagagtttgtgtcaatttgcaactttgaaggatatccaaattatcaaataatttacatatgatgattattaaattgaagtttctaatttattcttaacaaaaaataaaaattacattcacatcaaaagcaagtaaatcaatacttcccacatttcctgtttcccagatgcaaacaaagataagtggaagttaaatatcaatatacaggtgctttcaaaaaagtcttttggtctatttccactttcaaggtaacctggtggcttcttctctcaagtcctcacacaggtattcaggaataccaggatggcgtgcccaagattccaacagcctgtattacggtggaagatgcagaaatgatgtcaagaatggcttctcatgggatcaaaattgtcattcagctaaagatgggggcaaagacctacccagatactgattccttcaacactgtagcagagatcactgggagcaaatatccagaacaggtgagtgaaggagaaggctggcctaagaatacagtttcctggtctagtttgagttattagagatagtttgggaaagagagaacgtgaaaccacctagatggtcctcatagattcgttgaaggcagaagctttatatatattttttctcatcaaaattttaccatgtttaccatctcacaccagtcagaatgggtattactaaaaagtcaaagaataatagatgttggtgaggttgtggagaaaaaggaacacttatatgttgttggagggactgtaaattacttcaacccctgtgaaaagcagtttggagatttctcaaataactgaaaacagaattagcgtttgacccagccatctcactactgtgtattgtaaccaaaggaaagtaaattgttctactaaaatgatacctgcactcacatgtttattgcagcactattcacaatagcaaagacatggaatcaacctaggtgcccatcaatggtgggctggctaaaaaacaaatatatggtcatatatatatatatatatatatatatatatatatatatatatatatatatatatatataccatggaatactacccagccatagaaaagaatgaaatcatgtcctttgcagcaagatgggcacaactgaaggccattatcctaagtgaattaatacagaaagaaaaacaaaaagcatgttctcacttacaagtgggagctaatcattgggtacatgtgtacataaatactggaagaataggcaatgggggctccaaaatcggggagggagagagggaagcaaggtttaaaaaaactacctgttgggtactacattactctttgggtgacgggttcaactgaagccaaaactttagcctcacacaatatgtccatataccccctgaatctaaagtttaaaaaataaaaaaataaaaattttagcacattgactgaagaagggcaggagtaattgaaggacagaatggtattcgtgatgtggaaattcaacctcggaacaattgagagtggtatttgtccacgtgttgtatttattccatttgaagctagcctggcatttgagataaaaccaatagttaatacttattgtgttaattatcttatttaatcctttcaaagcttagtgaatttgcatatattttctgtattagtccattctcacattgctataaagaaatacctaagactgggtaatttataagaaaagaggtttaattggttcacagttctgcaggctgtacaggaagcatggcggcatctgcttctgggaaggcttcacagagcattcaatcatggcagaaggcaaagggggagtgaggtgtcttagatggcaggagcaggagcaaaggggaggggagatgccacacacttttaaacaaccagatctcatgagaactcgctaacacaagaacagcaccagggggatggtgctaaatcattcatgagaaacagcctgtataatccaatcacctctcaccaggcctcacctccgacattcgaattacaattccacatgagatttgggcagggacacagatctaaatcatatgaagtttcttcattttataggtgagaaaacaaacctagaaggaaactcaattacccaaggtccacacagctaagtaggcagctaagaaggaattcagacccaggatcttgtgaatattaaaccaagctttaaaccacagtttatgtgcagtttccagagttcatgaatttatctgcaaataaagggatggtatgcaagtaattaacagaattattgtgaggactagattaggtaaggcacatcaaatagctttgttgagtgtttggcacatcacagctcactgaatgtaagtttcctttgtatggcatcaagtgtgcaataaacactttttataaggtttctggtgcaaatctcatgcatttgttattgaaattctagaaatggaacttaaaaatgttatttagaaatttcagacttgtattttatttgacagcatcagtgggatgaaggaaagggtgaagagtgatggcatttggtgatggagaaacaagtcttatgcacatgacttctcccagactaaggactgggagactcaggactcaggacttctcccagacttgagggctgtactgcagtaaagattcattttaagctcaggactcttttccctcttctaaaatcatctgcttcaaggacctgggcatcaaccatggcttttgccacagggatgatggaaaacaagaactcagtagaatcacagggagtcagacagctgtagagaaacggtggtttcaaatagacaagcccagccccttgtccctttaagaaactgataacaacagaagagccaagagtctatatttcagatgctaaatagtcagatgccttaaagtgtaatccttcccaggtattttccccagtcagtagttccagggtaaagttatgtcatcatcaggtagctagcccagggcttgaagggtttaggattataatactatcgctgtttggtcgagcaggctgggtgagctggcctaaggttgtgggcaggtgggtggcagggtgagagtgagttattgggatccttagtctgtagcagctatggagtctcagaatctgaggctgaagtatttaggcagaggagttcttgagagccagagggctgagatagtgctggctctgacagcttcatgagggacattaacatcttctggctaggagggcttgggcctatttgtcagctcagcctgactcattcttttattttttaaaatcagctgaattgaggtataacttatataaaataaatcaaccaatctaatgtacaatttgatgagtttggaaaatgtataatgtaaccactactacaattataatatataatatttccaccacccaaagtttcccttgagttcctttgtagtccatctccgactctaccaccctgccctggcagccagtgatctcctttctagagctatagttgttttttaaattattatttcatatataagtgaaataatataatttgtagtcattttctgtgaggcttatttcactcagcataatgcttttgagatgtatccatgttgttgattcagttgtttcttcctttatatccccgagtaatatttcattgtacagatatatgacaattcgtttatccattcagcaattgatggatatgtgggtggtttctagtttttgattattgtgtataaagcttttgtgaacattcttgtactagtctttctgtggacttaatgttttcctttcttctgagtaaatatcttggagtggaattgctggactggcctaaatttaagtacccttctctctgtcaagatgcttcactctgtattttgtcggggtagcaccttctcccagaaggtagatggacaatttcagagcaatcatgagatttaggatgttgcctagaattccaagagttgatcataaatactttgttaccaagatgtaaaaggtagaagtttaacaaaacttcttccacaaagaagtaacagcattactttcacagaaaaaaatgaaaatgaggacagtaaagtcaagtctgtggttgcgttttgtggagggaatctgcattctagctggcctggaaccgcaggggacatacagactatgaaggcaagcaagaagcatgaagtccctctgcaggtgttaagttgactaatgagcctgaaaaagaatggccttatccccaataaatgtcgcttcttccatgaagactgctttgataacattcccctcatcccaacacttcatgccactgttatggtgtcatctcctagcagaacttgcaaatgccctgagagcaggcactctgttcactctatttcctttcttttcctttttcccgccctaatggctatttcaggaacttggcatgcagtggcttctcaacacatgttttattttggtaaaatgaaggagtaagtaagaaaaaaatggttggaggatgttactaatcttgatcctctttaaatctggaagttttactgcccttttagaataccaattgttcattggcacattgaacctcatccctgaatgtagtgcaacatgtccaaatatgaacacattggctccctcatacctgattttttgtctttgtttcttgtttctattaaatgaaccatatttatctaacagcaaagttataaaacttcaagttaattttcattccctctcctttatcactgtcctacagtcaggtatcacatcctattcagtctattttcagcatattaaaaaaaaattctgttcctaccttgcctttactgctactactgccttaattcaggccctcactatttccccccgattttttttcttctggtcttttccatacttctttgcaatgaggctcaaagttattttaaaacatttgatctcaacatggtgattccctgctttcaggtccctctctcctgtttcttataagataaaggttgtgatgaagataaatgctgaggtgagtaatcagaggtgagcagaagacagagaaaaaaagacaaagagagaggggagtcagggttagataagaggcagttatagtaagaagaaattatatggtaccattcataaatgaacagaaaatgagaatgaagaaaggggaaaaggaaatgtatgatggtgaaaggcaatgtctggtggagattcaaggtcaactgagaactgatctttcataggccagggaaggagttcagttccaaagtctagcagactttcctaaaatcattcatttttaagttatcagtaatgctaacagtaacttaaaagttggtttttataatttaggttgactaacttctgcctgacacaaccttgctactttgctccatagcatactaaagaatagtggtgctaaataacttataaaattagctgcagtggaaattatctctataaaaggagaaggtctgttgaaactatcattattctgcctgcagaataatgcaaatatctttggagacttgaaagtaggcagaggggaggaaagtgggtatcttagtctgttttatgctgctattgaagaatatcatagaatgggtaatttataatgaacagaaattagatcagagttctggagacagggaagttcaagagcatggcaccagcaatttgcaaggaactaaggaacttcatgctgcatcatcccatggcagaaggtggaagggcaagagatggtgagagcaagagagcaggaggggaccaaactcctttttataacaaactcatttttgagataattaacccattcctttgataatcatattaatccattcctgatggcagaaccctcatgatttaattacctcatattaggccccaccttccagcaatgttgcattggggattaagttctcaacacatgaactttcgggtgacatatgcaaaacattgcatggactaacactaggcagtggctaatagatattgttcagtaataacacccagtatagttccttacatctcatcaaccatgcagagaaccttaataaaagtaaagcagttagcatgtaaataatccttccattttggcccaaaacccatgggcaaaatgtggtaaatatcagctttagaaaagtgtatatgtgattgataaagtattagtacatttcaaaaccctgttgcataattcatccataagcctggaccgaattaaccacaggctttaaaaagatgccaataggccaggcgtggtggctcacgcctgtaatctcagggaggccgaggcgggcagataactaggtcaggagatggagaccatcctggctaacacagtgaaaccccatctctactaaaaaatacaaaaaaaagttagccgggtgtggtggcgggcgcctgtagccccagctactggagaggctgaggcagaagaatggcatgaacctgggaggcggagatcgcaccactgcactccagcctgggcaacacagtgggactccatctcaacagaaaaaaaaaagccaataatgaaaatactttattgggtttcactttgtgaaaatagcagaataggggtaatatatacctaaaatctaccctctttccaaaaaaccgatggtggcacattctggctcctctaagcccagaattctctctccactctgacttcctcagaaactgtactcttctgtgatttgggcatgttttgcaggacccagaagatcttggacagtgtgcatgagtgcacttcactggggctaaagcagtcctctggaagctctgacattagcctcagaactgcattctctcaagacagctttatccctgggaaatcatggtatatttaagacccatctatggttgagaataaatccgagtaggtgaaaatgagcgctttttgatttctgagctgatacttcatggtactaaaatagcaatattatttctacccccacttatcaaggaactactttgcatttgaaaattcagaggaaacttcttaccatctgtgaataggttttattttttgttaactctatagaggttatcctaacaattaaaatagtcttagaggcagagacagagagtagggatcctagagatttagtacaaactctatgactttcagattaggaaaattgaccaaggagaacttgtccaaggggacacagcaaatatgtggtacaaacacatctggaacataactctagatttctggactcccatttcttttaacctctaagagattccattatgcctgggcatgccttagttgaatggtgtataaatttgagggctatacattgattcaggatataggcagttccatccttaccaagtcatttttataggagaaattgtacctttctctcatgctttttctcctgacatcttttccctaagcacaaagagttctcatatctaccgtcctttgtcgtctcagagtttccttagagcacccctgaaggagtttcacctgggaaagtcgcctgtgcttgatccattgattttatgtatcctccctctaagtcctccttgggtcatttctttttagctccttgtcactttggaagaggatctgatgaatgcatcacttctggggtgttaatgactctttatgacgccttgttcccctgtgcctcttttcacaccccttcaccaatcagctactcaggtccatctttatcagagggcaacagaaaaagccaaaatagatgcactactaatcatattatattgtaaaataaattttttagaaataattttagactcacagctattgtaaaaatagtgcggaaagttcaaatgtatgctttgaccaggctaacatgatcagtgataacatcttacgtaaccatagtacattaacctgttgaggacactggtgagaggagactcctgagagcgagctgctttcttggaaagcgagggctgtcttgtgggcatctctgtgtagcacccagtgcagggtggacctgctctgactttagcccccttagtctttttccagttttaatttatgatgctttcatgattttccacaaacagatgaacaaataaacacagaaggaaggttgtgcttgaattgacctgaccagaggacaaactgatcctaaactggactctctctcaccagtaatggattctctaatgttgactcttggggctggcccatttcttttgatccccagcaatttcctaggtcttattttgaggtttgcttagtaaaggcaatatttttaaaatgttaatatattcatgaattattctgaagttattgtatggaaaggaaagtgtttgggattttggagtggttggcggttgatggtattcaaacccattttgataaggccttgatgcagtgaattttttttttaacatgcctttttcttacagcagttattttcatgcattcaaagaacaaattcagttttatatgccagtattattttaaatatagtacagtactgtgaaggctagtggggaacattgaaatgaaaactctagtttgttaactgaacacttcactttcttttttcagtgtggggcaggatttctcaacatcatctctgttggctctttggatcagataattctttgttgtagggggctgtcccgtgcattgtggggtgtttagcaacattcttggccactaaccactaatgtcacttcctaccccacaccacacctcctgcagtctcgagcatcagaaatgtctccagacattgccaaatgtcccttgggggacaaaagccaccccaagttgagagtcactgatgtggagtaatggaaggaagactagatgggtgttgtgaggctttggttctggttttatttctggcacaaataagctgagtggcttaatccttcatctatagaaggaggaactttgtctgaaaaagcttgaaggtcattgccagccctaaaattcctttattaaaaaaatactgaaagatgaaaaaaaatacttaaagatgaaatttatcatcacactaatggtaaattctgtgtactgttaaatagcaacaagacgtcatggaagccctttctaaagctggtgctggagaaaagcattatttacagagtaagggtgttgctgttttgttttgtttttaaattctgtgttcgaatacagttgggaactttcctattcaaaaagttaaacaggctccctttttctgtggtacttcttaagcctttaatgtgctgatgtgcactgggaatctttaagaggtagctttgcagtattctgcaaatttttgatcatggaacactgttttcacagagtatcttaacataaaacattttgtgaaacagtaggatgaggcatgagttttgctgggtagattatgttttagtgttttttattatattctttttaaattgctcttacattaattcagcatctatttacttattgggtattggtatgtgtgaggcactaaggttatagcaatagcatggggtgggcagtatgctctgagcataacctgtaaaatttgcatcctgtctcttatattttgttggtagactattttgcctttctggatgtaaacatcagcctttcctgaagatgggagaacttatgcagaagttgagaaataggagaggcccattaggagggacagcccacggtgggtctgacatgccatgtgaagggccagggctttgtcctgtaggcagcgcgaaggcactgtagagttttagcagtggatttgcgttttagcagtggattttcattttagcttactctggccactgcatacttttgagtaggcaaagactgaaattcagccagaagataatagagtttaaaccaagacagttgaaatagtgttggaaaagaggagaaggattcagaaaatgtttggaaataaagttggcaggagttgttgaagtttgggtatatgagagaaaaagaggtagaagtgcagtttgggtgagtaggagaattcatccattaattctacaggaatttattgagctcctactttgctgggtgtattagggttctctagagggacagaactaataggatatatgtgtatatgaacaagagtttattaaggagaattgactcacacgatcacaaggtaaagtcccatgataggcaatctgcaagttgaggaacaaggaagccagcagtggatcatcccgagtcccaaaacctcaaaagtagggaagctgacagtgcagccttcagtctgtggccaaaggcccgagagcccttggcaaaccactactctgagtccaagggtccaaaagctgaagaacatggagtctgatattcgagggcaggaagcatccagtacagaagaaaggtggaggtcagaagacttagcaagtctgctttatcctagcctcactggccattgcttagatggtgcccacccagattgagggtgggtctgcctcttcccgtccactgactcaaatgttaatctcctttggcaacaccctcaaagacacatccaagaataatactttgcatccttcaatccaatcaagttgacacttaatattaaccatgacaagttcaccccttgtcaacttgaacccatacacatctcctgaaatcgtatataatctccaaataaagacaataattatgcctaatataatacagctatctcttgtgcaacccggagcacactaattgttaacctaaatgctattacataaagttaacaatacttaaatactgatatgaagtcaataactcttacgtcacatgacaaaggaaaaagaaaatgaagatattttcttagtgcaagtgtatacatctacatattcttaacaaaattaggaggaaatattcacaacaattacagtcctctttctgtagctggtcacgtggttgtagctggtattgatgactacctttttctactacctattctgtattccctttgccttcagcaagcacctcagtgggtcgtagttttttacttggtgtagtgacccaaaccttcactcctgaagggtctgggccatttgtagtcatgcctggattgggttgttgtagtttcccattgaccataatcacaaggcatggtaatactaagagatgccgtaaggatctcctgtattccatgcatactcttccttacctccattatgggataatagactaattttatcttgataatccggatcagttgccccggccaacactgtaactcccttcttagcctgttgacttagaggtaggcagagcccaaagtgtccagatggcaaccttaacttccaatttaatagaatcattgttgtgcctcctggcaacattcctccctctggaactaagacttctaagccagcagaatataatgtagcaggaacagaaaacaagaattttgctagtgggtcactaggggtgatggtgagtgatgccacttccatttccaccccttgttttttggacctgtgaatcctggctatgggagaaacagtaccatgtattggatgctgattcagatcatacacagccttctggagaacttcactcgagccctgcaaagccctgcaaagtattgtcgcctagttggcattgtaattgtgacttcaaaagtcattccaccattctatcaatccagctgcttcaggatgatgggtaacatagtaagaccagtgaattccatgagcatgcacacattgccacacttttttagccatagagtgagtgtcttggtcagaggcaatgctgtgtggaataccatgacggtggataagacattccatgaatccatggatggtagtcttggcagaagcattgcgtgcagaatgggcaaacccatatgtctattccggtgcagacaaactgctgccctttccatgatggaaaaggtccaatataatcgacctgccaccaagtagctggctgatctccctgaggaatggtgccatatcgagggctcagtgttggtcccggctgctggcaaattaggcactcagcagtggctgtagccgggtcagcttggtgagtggaagcccatgttgctgagcccatgtgtaacctccatctctgccaccatggccactttgttcatgggcccattgagcaatgacaggggtggctggggaaagaggctgagtggtgtccatagaatgagttatcctgtccacttgattattaaaatccccctctgctgaggtcaccctttggtgagcactcacattggatacaaatattttcacagtttttgaccactcagaggtccatccttaaaattttgtatatacatattatcccattatcaaatattgtcaaattgccctcatagcaccatagctgcatggtaagatgggcaattaaacaagcaacagtgatagaaggtggtaagtgccacagtatggcagctacatgcttctataggggctcatttgagggcaaccgtcctggtctaggaagccaaggatggctttctggagagattcagtttattcctactaaaaagaagattaactgcatgctagagattataaggatggggttgggatgaggtatattacaagctgaggaagtacatgtgaaagcctgaagagtagtgttactcttttttttaagaaacgtgatgtgacttcctttaacttctgaattcatttgctaatgaatcctgtttttatggagttatcctgtaaaataacccaaagacaaagacatggcttttttaatgtatatgtgtttttagaaataaatcattgaaaagctcagtaatccctttggagaacagctttagcattgatgctgtcaagacccttgtcaaaagaataaaccaaacctgattggcctggtggataaactcattccatacataactgaatagttagagactgtacagaaatgcagttttgcctttcatcttaatatgtagtctgatgatttgtaaaaaccttcttagtgggaacagcaggttattctgcctgggtgggagcctttttactagcttaagcagctgtttaaactttcataagcaaagtaattattaaatgtttcatgaacatattggttggaacgtttgttcacattttaaccttgagttggaaagtttcaggggggtggggttaaagagttttaagctggcaaattcattctttttttctttcttattataaactttttatggcttagaaccagccaacctaaatcatggaaggaaaaatacatgtgtggcaagcatgagacatttcattgtttatttttcaaatttctgaaatgtgctcatagctgtgcatgcctctgggctcataaagacagcaaatggaaatagctgaagccagacagactgttttagatagatagccacccaggtaggcaaggaaaaccttgtaggttactctttcctccaatcaagtcatattaatttgccaaaatgggattttcaagcaggaggatgtgatctttcataggtctgaacaccttgcctttttcaatgatggagccatttaataataatcataatcagaagatgaggaataatatacatttatagaatacttagtacatggcaagtgtatatgacacatagtagtctacgtgtttctcatacattatctcctttaatgttcaccacaaccttgtcaaacaagcaatgctgttatatccatataacagatgaagaaacgaaggcttagagaggtcacagaatttgcaaagcttctgagtggctgagctgggatttaaattcatctgtcctatccaagaacaattcattatcctgtacttcttagtgcctttttattctagtttgtgaagtgctgctacctaaagagtttcccattttactctaaatgaaaaagaaaaccaggacaaccatcagcatcaacagcaactaatgcttgttgaacaactactatgtgcaggacgctatgttataagcttgggaaatattctgggatgagaataaagaagataaaagggtccttgcccgtggctggtgaggaaaataggcagtaagttctagagctcacactgtgcagcactagtgcagggcctgcagcactgtgtccttgctggcccagtactaatgtctgcatatagtactttacaatttgtaatgtgccctcactgatattgtcccacataatcccaacaataggactgataataatgattcccactttaaagatgaggaagctgagattcagagggacaaaataattggactaaggtcaggcacacaccaaaataagtggaaaatacgattcaaaatgtggttctctataacttgctgtagtcattacctagagccctgcaattttatatagcataaaataaatgctttaaggattacctgaaacacaaccttaaaaaatgaaagcctttaaataataataattacaatatagtgaagtaatgagagcaattttagtagttttaaaatatgtccacatttttttttaaaatttctgtttaaaaggtggagccgaattctcttcccctgcatgtgtactgtacttagtgtctgacttctagtgaacagaatattgcagaagtgctgggttatggcagccaagattagaacataaaatgcagtgtagcttcctccttgctctttctcttgcatcacttgctctgggagaagccagctgccacgctgggaggagcacttggagaggtccaggtggtaagacactgacttcttctgctattaaccagtacaaactagctaacaagtaaatccaacaggtccagtctaggcttcagatgacttcaaccctggccaatattttgaccacaaccttatcagagaccctaagccagaaccacccagctatgccactcccagattcttgactcacaagaacagtgtgagataataactgtttattgttttaagccactaagttttggggtaaactaatacagcaattaaagggcacaagatacacagaaaggaataactgtgtctaagctgtcacaaaagatgggtactaaaatgtgacaaatatgagtaggaacttataggtggacaaggaatttattgggaggtgttctgggcaaagaggcaagtgtatgcaaaaaagtgtggaagtgtgccacagcaaggtacatttatgaaactgcacagtacagcacaagataaaaatcacaccaagaaatgtaatatatcataatataacaacaaatgttcttaagagtgactttgagtctgcaagaaatttagttctatatggactattttaaaagataggaaagcaattaaaacattgtttgaaatatttacttcaaaatttttttaaagtactgtataaatttttagttagagtctaagctatccagaaaagccacttccctgttttcttacttcactagaactgtctggttccatgttttgaaaactttagtttaaatgtagagccaagaattaactaatgaagaacacctggattttctgcaggatttcactgcaccaattctgttacaacaatcaggtagaaattaacattttataaccaattatatgttttacttggcatcatgctaaccaactgaatttttacaaaagagaattggccaaattgactcattattctccaccatacctcactcattgactgactatttattgagtgccgtccgtgtgttacccactgtgataggcccataaaacaaccctttatggttgcaaaaatcactttgcatcccagttgcagctctactgttttctagagttaatagaagttcctggtgaaaaaaactatgcttagtttttttctaagcatgtttaacttgggtttttaattaaaattaatacctactcatttgaaataaagagaaaagtgaaaagaagttttacttggaaatacattaattgaaagacagttgctgttagcatcttgctgcacttctttcactctattttcttctatgagtatctttataaagttataatattttatagatactgtcaaatctagttgttgtttaacatcaggcaaaatatcccttgaaacagaatttttaatgtatttaagttattctaacaaatggatatcctgcaatttacttaacctggtattagatgttttgattatacatgaatctttcaggaaaaatgatgtcatagttaaataaatatgtagctagtgaattttgaatgtgtcttttgaactgtttatgggctttgtgataattgggtaattttaaatgataatcagtaggaagcttaggaagaggttaacatggtttctctcccttccaagagaactgcctttgtaagattctgagatgaccactgtggccatgtgcccaagtgtgctgtcacagttatactgtcagttaaattaagcatgaatgattggatggagaacattattattctctgcacattcttgattcttaatttaaggttaaactaatttaatgtcatgtgaatttttagcagcaattatggacagttaatgcatgttcttccttagttatgcctcatctctttgcaaaattacaatatttcattccaaatttcttctgaccagatttggaagtagctctctcttctcttttccctcaatgtttatatcagaagggttttgagtttatactgtaaatctccatttgtgtattttcataataagactctaagaaccttgactggttatgagggcactggaatcaaagcaaatgagggcactggaatcaaagcactggacccagtgctttctccatccttcaggggatattgtacagacaatagagatgctatcttaacatctctgtttgagtttttccctctccacctgtcttgcataccaccctaaccaatactccttaagtatggctctatattactatgcccctatcaacactctattttaaaaaggcatggcttcacacttcctgtaagataatagccagtagtccttgaatctggcattcaaagctttaaatctacaagatgatatactggtcataccttttcctgcctattttctagagtcttttcccagaagactctgttccatgtatttggtgtcactttcctgtctctgtgccttcctcatactgacccccttttctaacctgactgttgaaatcttacctactcagtcttttttcatttatttgttgattgtttcaataaaattaatttacttaataagtatttactgagcactgattgctcatcagacaacattcaagagcctactgaaatggcaccttccctgagaagcctctcttaattacacacccatatacaatgtttctctcttcagaacttccataggtctcttttttatgctttccataaaatttgtcacaaatcccataccttatttatgtgcatataggagcatctaatgggaactcaaaattgctttaaagaacataaatgaatgaatgaacatgaatgagctaatgaatgaaagaaaagttatgccttctgcaccagcagaagctaatgactaaaataaaatggttaaactggactagaaatttaagattgttatgggtttctagtctaggaaacaccctcaatgtggtttccatattggattatcccaacagagaaagatatggaatccccatcttctgattcccacaccattactctttctgcaccatgttatcacatgctactctattaaaattgaggcagtattatcatactttgttattgcttttcattattagacatagtgttttaaggacagtattgaataggaagattgttttttcagagtgctgtaacctattttagcattcaaaggggcaaatgtataaacctgagtggtgagaaaaacgtagcagattaactaattttgaaagataatttattttgaacttgagtaggggctagggaccttcattagttcctaagaaaagtagaccacaaactcaacctctatgctcttttttatctagtcatgatattagagtatgtgtggactttgacagtgacacctaaatggtttttacttgcctcattgtttccttactaactgtatgaaagaagaacacgtgttgagcccctccaatctaaaaatacaaactctggaatgctccaaaatttgaaactttttgagtaccaacatgactccacaagtggaaaatcctgacctcacatgttgggtcacagtcaaaaggtagtaaaacaattgtttcatgtacaaaataattaaaaatttgtatgaaattatcttcagactatgtgtataaggtgtataagaaacataaattaattttgtgtttacacttggtcccatcctcatgatatctcattatgtatatgcaaatattccaaaatctgaaaattccaaaatccaaacatttctggtcccaagcatttcagacaaggaatactcaacatgtgagactctggaggtgaatttttgtttgtttgtttggttggttggtttttgcagtaaattgttgaagtcttagaaggggcgcattcagcagttagagcttcccttttaatttgcataccatgccgaagaagaggaggtgtgattctccttctggagatgatcattctttcaaaaagaattatggtgaattgtgttttttaaaaatagacttctagggcagagtaggggaaaaacatagggaaccgttaattaaggtatcagggcttgagaacgttgtttttgtctgcccaagacccttcctttggaaacagcacctctcccaacatttgtgctcctagtggactggtaacttgcactcctaagaactggaatcttgaggaagacacagagcgatagatgagattggggctgagtcatccatgatggtatcctgggcagttcagaatctctgagcctcagtttttcttccccccaaaatgggattctatgtctcactgagttatttgaggattcagtgagatgatgtctctgcaagctttggcacagagttgttattcaagtgaatattagctaccactctttgaggttagtagtcctggggacaattcttttctccccctaaagaaggaaagggaaaggaaactttctactgaggaggtagcaaatgcagaatcactgaaagtgcttgcgaagaatatccaactattcaaattatgaattagcaaaagataatcaggtgattgtgaactgtgggttgctgctgctttgttgtaatactgctgttaaaacccacgttagagatcacatggacacaggaaggggaatatcacactctggggactgtggtggggtcgggggaggggggagggatagcattgggagatatacctaatgctagatgacacattagtgggtgcagcacaccagcatggcacatgtatatatatgtaactaacctgcacaatgtgcacatgtaccctaaaacttagggtataataaaaaaaaaaaaaaaaagtcaatagtactgcagaaactcaggcttcttgttgggtcggggagtggcgaaatgtaaagggagtaaaaagggtggtagtctataaaggaactagccatccagccacccagaaaccaagtccctcttttaattaatagagttatggagaggctccagcatattaataaatgtccccctatgggtggtgagaacgtcaaatgtgaaacagagcatattggattttgtaataaaaatacagagaattataaatgagatgtccaggaggcatctaagttaaggacacctaagatcaagaatttatattctagttgataaaaagttgtggataaaattagggtgctgagatggaaaaagaaaggctcctgttggcaggaggaacactgatatgaagtgatgggagagttttgatcaagcctgtatctttggtatttaatatggggatgcgtagagagtattagaagccataggtacagccacatacattgttaaaatgtgactttttgtatattatttcacgtttgagcaattaccaacttactagcagttgtacaaaaagtaagccattgtgaatttgggatgcattttcacatatacattgtattagaccattcttgcattgctattaagaaatacatcagactgtgtaatttataaagaagaggtttaattggctcatgactctggaggctttataggaagcatggtgctgacatctgctcggcttctggggaggacttaggaagcttacaatcatggtgaaggtgaaggagaagcaggcaactcacgtggcgggagtgggagcaagagagagagagtgggaggagaggtgccacacacttttaaacaaccagatctcatgaaaactcactcactattgcaaaggcagcaccaagccatgaggaatcttcccccatgatccaaacacctcccaccaggccccacctccagcactagggattacaattcaaaaggagatttgactggggataaatatcgaaactatattagacatgaagctgcaaattattatttaattcatattctagcattaggtataccagaacaaggtatctgggtaagagaaagtcgatatgaagggcacaagataatggaggaagacagtttcttctatcgtctagggactttgagccaattcttgggaaaaaaaatagatgatgttgtctttgatggtccttttgttgttgttttgatcctcttcttcaaattcctggtaccttttctttctgactaacagaactctcttgttgtaaaacagcccagtgaaataggtattatcccaatgttacagttgagaaaagggggctcagaaaggttttgttaacttgctcatgccagtataataaataggaaaagccagtttcataatcaagtatgtctggctctaaagctcaccaagtccaacatttttgccttggaatgtgtaagttaacaatgcccccactaacaacatgaagcaatacagaaggaatgggttgagatggggtttgggcaaagaaaagatgagcttggttttaggtatgttgattttgagctaccttggaaagccattttctgttttgtggttgcaagagaaatcgtggtttgttgccctgtgttagacatgggtaaacttagagtgttccatttgctgtagaattagtggaggatagatagatgggatatataggcagagatcgatagatagttgtttgtacattggttgtttgaaagttgagcaatgtctgcagtcactagtcagtatttctattgcttagcaactctatttcctcatgtagccataacaaatggaacttttatatttattttttatgcttaagggtacatagtgctgcttataaatgatgcataagtgacaattttatactgtgagcattactctgactcttggaatcatagaatctcaaggttggacgggaacttaatagttggatttgttctatattcagactgctttacacctccatgaggtcctgactgacacatactactcatttagatagtgctccctatctgaaaagtcttggttttcagataacattttctttcctttaggcaaattattcctgttttacccatgaaggacaaatccaaatatcttgtcttcatgagaactcattgcacatttagaaataggccccatgtctctgccaattttctctttcctgggctgagcttcttctccatcttttcagtggctccttggagagatatattccttgagcgcaggactctttagcccaggttctgggaatgcacctcacagaaggctccagtgtcatcccctgcaggcattgtctcactggcagagagccactcatccatggccatagccttttccggtgtagtccccatctaatgatcaattcagatggggtataaaagctcagttatttcagtccaatatgtgacaactctgacaagccattttagtctcagagctgctcatggggtcagctgagtctattgttgggctgcattgcaacttgatttgttttctgttccttcttgagtccttcccctccctttctcaggtgttcattcccagggcataaacattctgcctgccaactctgatgcagagtctgcctcctggggaaccaagcctgcaatgtatgacttcaagtcttcttatgaaaccattccaatttgtttatggacttagacttctggagtggatagatacctctaggtgtaatctcctgtgtaatcagaatacattttgctttgaagaatattttaaattaagtaagattccacaaatctaatgtgtaaagctcatgcagtagaaagttttcagtgtggatgtcttagcttaggttccccctcaaaagcagagtgtgaaacaaggacttacatgtgagtagtttatttgaggaaattatcccaaggaacagaagtgggagactggaaatgattgttcacaataatctctgtcatttcatagccatagtttttcatcaacactttcctaatgagctcatctttgggatgccaagtgacattgctgtgtgctttcttcaagagatctgagcaatgtagtcagacagccaattaacatttttatttactttgggaaagctttgagtcctgagacctgcatgagatttttctggtagtatttccaactgtctaacaaaacatgtcaaaaatttcatatttgtcgttccaggaattcagcttaataagactacacagaccaggactgagaggttggtggcaaaggaaggagctactgagagccacacatcaataaaatgagatatccaaagcatggaaggagggtcagtcaaggcaatgagggatagactgggatcagttcaggaggctcctcccagaaccaggaatctaattaggagactgaaaagaaaggaagtgaaggggccccaagccagagagccctatgtataaaattatacatgattttatatatgtaagtcgtaatttaattctcacagaaatattgtgaagaatgtgccaatattattatcaaaactatttagcagatgaagtaactgaggcacaaagaggccaaataaattgtccgatgttgcataggtagtaagtggctgagcctgacttcaaacctcgatagacttttcccaaagttcatgctcttctgaatattacttatttctcatgtacctgtttctgaggcagaggttctcatgtattataaatttccttgatgaaagaccaggactggttcagaatgtgtgtgttggagaagaggggtgtaacagatacacattttatagacctccttccatcccatccatctgggcccactgcatcttgcactgcaccactcagggaacttcccccttgcccttgtctgctactatgtatctcggtcagcaagttccaacttggagtttctggctcttcttgccacttcaggacttggatgagatactaagccatggggcacgcaatgtggccccacatgtgttggaagaagccagatgatacaccctggacatgaaggagagttaactccttgtagggtgaaatttgaccagaggagggcaatggacaggagggaagtggctaaattccctcatcttgcactgtccaatcgacttctctgaggcatgagtttttcttctagctcattctttcccttgtcaagtggacacaccagcaaaggacctgttgcgtctctttgtggcttagtgtgaagtgataggcaggatagtgatccttcagttggcattgcttggcatcttttcttgcctcaatttccttctagctcattctttcccttgtcaagtggatgcaccagcaaaggacctgttgcgtccctttgtggcttagtgtgaagtgataggcagcatagtgatacttcagttggcgttgcttggcatcttttcttgcctcactttccttctttctaatccttgtaccctgggtttacccctttcaaagaaagcattaaaggccaagctaagaaaatgggtctggactaaaaagtggaaacaaatagagtagtaggcatagttcttaacagcacttcactgttcagagacaagaaaggacatagattctttgaaaaataagtgtagaacaagttagatgttgatattatgactaatgtgtaagttccagtacttaacaagaagttgttgtaaggtgagtatttatgaagaagggggagaagggaagaactccctgatcaggctgattttaagtcagatctatttactgcctgttatgcctgtctcctcttcctcttcatgttgctaatagcaaaaatagccgctattttctgaacacttaaatatatgtctgagaccatgctaagtgctttatgtatattttctcatttattcctttgaggtagaaaattgagactcagagaagagaagtagctgtcaagcagctaatgagtgctagcaccagatttcaaacccagggctgactaactctgaagcccatactaaaaatggatttgttctgctgtcttctgcaaagttccttatcaaaggaagttatctagagcagaggaaagccatatggagaaaaaaatatggcatgagagcatcttattcattttgttcttatttgctccgaaagcaacttctggtggagccagctgctggtgtttggagtgtctttgccttctaggaggaaatactctttcctaggtgccacactgttgatacttctcaagaccaaaataccacaggcctccagctccttgataaagctttaatgtgttgaattggcataaatcaattccctaagtctgcctagcagaaccaaactctgaatatggtgacctcacagggtcacctagctcaaggcagccagcaggcttcctacttgatactttctttgatagatgtctttaggggagccaacttttctttaacatctttcctttgactctaaagctctcctctcccaacatttcctctcctcagtttaacccgagttatgtgttcatgacataaatagggccacgtttgccgctgaatgatgtcacagtgcaggtgatccacagatagagaatacaaatagcatttgacatttgcctttgggatgccttatactactttttatcctcccagtaatgtttacattgttgttttgtttttgttttttgttatttaaatgataatggcaaaagacccttgttaagagtcatgagatctgggatctgattgcagctctgacttatcatctggatgtgactttgatctgtcacctggtcctctgacgactcagttcattcacctgcaaaatgggagagttgggagagattatttattcttaaaccatgctgatcatcagaatcaccacagatgctttttaaaaagggcccatctcagagtcctgaatcacacttcaggtgaagggaggagaaaggagattggggagaggagcaaaggtccagaatccataattgcaacaagctgcctgggtcattctgatgcacagtttaggacaactttatgcaatactgccagttgcacaactccaaggggtgccacttgcattctacagactccatgggcacagttcacatgaaatagaatctgaacagcccctcttggtattgtgtaatacagcagccctgtatgagctgattactgtatagggtcatttgtaagcatggatattctttgattggatgacagtagagtgctttgaggtcctcagtagacagtagccctgtattagttcattttcactctgctataaagaactacctgagactgggtaatttatagagaaaagaagtttaatggactcttagttctgcatggctagggaggcctcaggaaacatacaatcatggcacaaggccaaggggaagcaaggcacatcttacatggtgacaggagaaagagagagagagagtgaggggggaagtgccacactttaaaaccatcagatcttgtgagacctcactcactatcatgagaataacaagggagaaatccacccccatgatccaatcacctcccaccaggcccttcctctaacatgtggggattacagtttgagatgagatttgaatggggacacagagccacaccatatcagacccataagcatgtggttacagatgaaggcacagtagctgtgaccaataggataggaaagtggatggcttaagaacagctgatgaacactgccccatacaaagctgactctcagattgtctcccacattatagcattacagctggtgcccatctgacaagagggagaggtgtgtgaagaaagcaggatgttgagagcagcgtgagccaaacagcaggacctcgggtcatggtttccccaatagggttgaattgaggaaaagaaacaaggctttctcccagctaagaaaagcttttagttgcctactaatttctgtgctttggggtttctttgactttgttttccctttacacatggtgaaattccttttgaaaataaattcagccctgtcttaaccaaaaaaaaaaaaaaaaaaaaaaagactggtaaacctgtatggagatattacttgagttcctagaagccaggttttgttagtaaaaaattggataagtttgggtacttgggcagacagaaagttgaaaatctggggaaagactgttagcatgcagttgtgattacattaaatgttataaatgaatttttatcagaagctattgagatgctgctgagctgacttgaggtattccattgtctagaataatactctgcttaatttgcatgagaatcagttgaggcatttgtcaaaaatgcagattcctgccacagccccaggcaattctgagtcaccgggtatggagggggcatctgggctgtgcattttacatgagcatccaaaaatcatgctttgagaatgctgccctagacaactgatggaaagacagggaactttgttccagaatacatcctgtgttccttggaaattatattaactcctctcagccttagttttccctcatgtaatgtggataaggatacttaccctttccaaaatcagaggtcttagaaaagtattttaaaaaataaactggataaaagaggtaatgctagttacttagaataggaatttatgtgaataaaagtctatgtcttgggcttctgtaaactcacctctcaaccccagcatacagcacaagaatatggaaatagaaggaagtatgtatgcatatatgtgtataaatatgattgagattgtgtaggagcctgtcttagtccatttgtgctgctataacaaaattataataaaataccaccaactacatagcttatatacaacagaaacttatttctcacagttttggtggctgggaggcccaagaccaaggagctagctgactcagtgtctgatgaaggctcactttctcatagatggggcttttttgctatgtgtcctcctgtggtggaaggggcaaggcagctctctggggcctcttttataaggacactaattccattcatgaggactctgccctcatgacctaatcaccttccaaacaccctgcttcctgtcacatcacatatgaattttgggaggacacaaatgctcagaccataggagaaccttggaaagatttctagaaagtcaaacaatagatttttaagaagtctattttctaataagctattagttagtgcttattagaaaatagaatctgccaaagtaatgtaggaggagcatttatcaaggcagattgatagagacagctcagtagataaggcaaacaaatgttgaccagtgaattatattcataatatattttgtatttgtaatatattttgttcttatttagagaatgtactaattagggtaaagtatagctgctgtaacagagaaccaacaatctagtggctcaaataacaaagaagtttatttactgctcatgtagcaatcctggtatgagtagtcattgcctgatgagtaactttgctctgcatggtcattcggtgagaggttccttctatcttgttgccctgctgtcacgtaggacactgccatcatttactttgcagaagctggcttgtcacctggaaaagggacagagaacatggatcatcataaagctcagacctggaaatggcacatagaacttccattcacaaaccactagtgagcttaaaaacaccaggatgcctaagtgaaggggaggctggggaatgtagcctatcaaaatagccatacccaaccataactctattgttactgctgttgaagaacgggagaatggggttggtgactaactagcagtctctgccatgggaaggtatacagaactttgaaaatggagccaattactactttttatggcttcactaattggccagagctactactgtgctgtggagtatcagtgtttcctttgatgtgttgttcctagcctctctatgggcttatatctagcatcccaggtaaacctgagagttatcctgggcaatgtggatgctggtattccattttctcaattttagggttctcctcctgtatcctgtacaggtcatgagaaaagacttgttgagtcctatcctactgttaataaatgtgctgttgataggaaaatgttggcagaagtgccaatatgaatagtcttctagttgcttttctgatggttgtgacataatgaatctcaaatgtgacttttgtcatataattggaggctctgaacattaagaacattttcttaaggatcatccaggcagaaaatgagttcacaggtttttaacatttttactgatggttcccaaggctccacctgtcccttcattctattctatactgcctctttattggatttctcccccactgcaacgtgtgtgtgtgtgtgtgtgtgtgtgtgtgtgtgtgtctgtgtgtgtgaggagagagagacgagagagagaggagagagggagaagagagagagaagagagagacagaaagagaaaagattgacaatatatttcagaattcttaaggtttgctcctcattattctgtgatgtgcagtactattcataacagaaaggtctgataattagctgccttgggatgttctaaaggtgaagccactctcctgcaatgcatcttgcaagagagattagtgatgtagactggaggttggcatgtgacagagactgttaaggacaaaagcagattgataacagtgaaagctgctgcttggacaggttcatggatttagagagcgacctccccgccatgggaactggatccctatgaaactgtggcatgaactacaatgagatgaaattacctcagagaaaaatctgaaggcacatttgagggttgggacattgcttaggaagctgattaccaaagacaaaaacattcatgtgtatagtgggagaatgggagataggttactctttaaatagctagttggcattgtcattgaagtttgccttactggaaaaattatgcagctatttctcttttcagttttatacacatgcgcacacacacacacacacacacacacacacaccatatattctggggaagaggtgttttattttccttttgtgtcatgatttcatagacccttatattctctaagagatctgggctttcagccacattcccataggattctggaatttttccctctaccctcagcctgccccatcacccaagtgtgatttttgtgattcttgtgtttctctagtgtctcaccaactgtatttctaaagcttggtcagtgttccatcttggatttcttgttttgccacttgtgatggcaatttataataaaaccaagatatgacctgttttgtatccagcaatgaaacaagttggaatctgcctgtgatgtgcaatgtgccttcaatgaaggggcagctgtgatgtgaatggatcttgggggagagaaaggaccttaatttctcttctcttttcccatggatataaaactttgttatggtaaactaaacctctgatatcatatgcaaccgctggcattctagattgttttaatggccactccttattgcttcatgctaagcgttaccatctgtttctttcttaattataaatgcagcaggaattcacaattacatcagtaacggtggaaataaaatggagttagaggctttctacttaacacaaggcagccttcctctaatatttttcttctgttacaggcattggtcagagaggagactttttcagtggttttcttttccctctcttcagtatacttaccatgagaatgtcatgctataaattcagcaatttccttttaatgagagggagagctgtgtttattttctgtccatggagctggggatgtgtgggcagctctttctcacagtattggaaaccagtggtgtgactgtcctgctgttattggcctctgtttttgtgaaaacagatgagttataatagcccaatgacatgagtcatgtcatcccccagaggagagctgggagtggacatctaagaaactctggtagccagcctgcctgtctgtgaatatatgggaacatttatacagggaggtgatataaaagctgaagacatgtttaacccagattacttaggcttttatttttcattaagtggaaaaactaatcaaatttcagactcatgaaattttagtgctaaaagaaacccttataaatcaccttgatcaaagctgtagtgactgccctttcctttgtgtagtgctcgaccaggttgagcacgggatttggagtcagcagaacaggtttgattctgaagccaccaccatggactttgagtcctcttcactgagtttttagtgtcagttctctttatccatgacaggagacatgatgcttcttatgaagcctatgtttggattaaatgagagggaacaagtaaatcctagccattgtgtggccggtctgtggggtttttttccccttctttccattcacatttatgatagatgaagagatattggtccagagaggttaaatgccttgcccaatatgatacatctagttcagggtggacctgaagtagaagtagttttaaaactctatttcaaggcttttgcttactatgtcatatctagaccctttgctacctttctccatccttgtcaccattgtacaaggatatgtacttttgcacaatgaataaccacaatggttatcatgtgtatgatactttttaaatctgtaaagtaccttttaaaatgtatattcccatttaacatgaagtaggtgaaatagtgttataatcttttttttctctctctctttgagacggagtctcactctgtcgcccaggctggagtacagtggtgtgatgtcagctcactgcaagctccgcctcctgggttcatgccattctcctgcctcagcctcctgagtagctgggactacaggggcctgccaccacgcctggctaattttttgtatatttagtagagacggggtttcaccgtgttagccaggatggtcttgatctcctgacctcatgatctgcctgccttggcctcccaaagtgctgggattacaggcgtgagccaccgcgcccggctgaagtagtgttataatcttatccttcctcttattttaagttggaaattctgaaaggtcaagtatcttgttgaagtcacacagaaggctgagtcaggacttgaaccaggtttttaagactttccatatatgggcttcactctatactagatggactcttactgttacaccagtacatgtaggagaggactgaaagatgcagtaaaaagaaatcgatattattatctataatttaatagttgtagttaggactttttatgatgtgaatactataagaccaaaaccattttcttgaattatattaatattttagcgatccacgtgctttttacccaccagaaggttcccctgggtaagtaaagaggtggagcaggagagagcaggtttgcaccgaaagtagttacaaaacaaaacaaaacatataagacatcaaccacaagaagcccttgctccaaaatgcaaatgacttatttgctacttcaaaaatgcacctcatcaatgaagggatcatttgatcatttgttcctgccaagtttatgtttagtccaggaagggtcaggctggtgcatattctcacccaggggtctgagagcacagtggcaggtgtgaaaagagtctttgggccttgcacttgccttttcatgccaatgccctcatccaaataagaagtcccctttgcactttcccagcttctaggccatatgttatgtctgtttcttagagggtgattcaatgattcctggtgataatgacatcacactgagttttacttacatcctgtttctcttgtataatgcccatgctcctcttgtcatgcggtcctgagccatcagggcccactctataaagcttcctgaaaatcaggccttcctggcaacaaaactaaatcttttaatctcagaaaccctactactgaccatgtatagaaaaccatgcaaatttaaagaatgtaaatattgacattctcaggttttcccatgtaacctgatttagtctgatttccctattatttctgccatttctgtgggcattttactgaagccaggttttataaagcagcccagaagcagcatcgttcataaggtaagggcacaggctgtagtatcggccagacctttggtcgagttctggctgtgcagcttgactgtgtgatgtcaagtaagttctcagagcctccctttccccatctgtaaagtgatgataacggtgcccacccattagctggtgctgtgaggatcggatgagctaccgcatgcaaagtgcttaattacaggacaatgttttgcctttctgaccccccagaaccagatgaatgattcatttgtgatgtttttctcttattaggaagctttagctggacaaaggtcattcaggattattttaacatatgaaatgcatttgttttattgaaagagattagaaatgttattttgaaagttttataccttactttagaagtcaagtcttataacattagtaggttttcacttcaggttactttcatgttctgtcttttcactgtgagcaaggtggtaagaaagccattctttctattgtcttgtatgcgaatgtgaatatatcctctatgtgccaaatacaacttcgtgagcatattgtttgttttaatgtagccttttaatgtcagaaaaaaagtctcaaagttctagtataataataatgattaaaatgcttattaaagagcacattaaaagataaggctattttgaggactcaggggcatataaacaggttattattttttcatagatgtattaaatcagacatgtgctagccaaatgtctgaccttatataggttttcttcagagttttacagaaataatgctaaaataaaggaatgtgaattcctttgccagttctttgaaggaaatggtagagtctgacctacctcgaaggagtattaagagaaacaacctggttatattgctggaggcttagagtctttaaatagtctcagagatcaaatctccctcggctacatagaatgattccatacgctttcttctgaaacttcctctctatctctaaatggggccattttgagcccctcatgaggaggcgcagtggaagaaaaatgttctgctgagcagaatctgcaagccatgccacatgcagacatctcatctgataatgacattctcactctgtagaggccaggaccaactgtgttatcctctttctcctgctcctctcctcccacctcacacatgcacaagcacctgtcaaccaacatcctcataccccttcttctcttagaaaggaggggcttcaaataatattctagggggaaaggtcccatgactctctgataagaagaggaatcctttaattctactaaacatgcaaaagcattgagcaagcaattaggcaaccatgtatatagctccagatgtcccatacatatggacaattgtccacactgctggtggggctggcagcattttaaaaactggttacaacacatatggtcctttgctttttgctctggcatctgaagtcttgctaatccaaacacatcatcgctgtggtacttccagcacagtaaatacctatctgctctcaagttacaaatgcggtgtgcttccctagctcaaggttgtgggtaaattaattcttaaatgaaagtgagaggcagggagctttgcaaagagaagaagcatgttaggtgtaggaagaggaaattaaatggattggactctcctctatcttttcagtgttttggccctccacccattaaaagctttcaagctttattggatgatagtttctaattccccttctagccaaggctccaaggtatgatttcaggatggagagtaaattctttgtgtttcccatctctcagaaaaattgcttatcagctaaagttttcgaagagtcagtttatgggaagctattttggttgtctagctacttatgttatcattattcagtctaaagtcttgcctattgctgaaaactttatgcaaaacaagatattgtggttatttatttcttagccattgctttgttgtttacacacccacataattaccttgaacaccacaggaaaaaaattgcaaaataatatttcctaaacacactttgggtttacaaagtgattataaatggcttttaaagaaagtaattcttgttcatttcattgtattcaagcttctctacttaattgtgctgtgtgtgttggaggattgtggtggtaagttgagatatgtagacaaaacagattttgtcatttttttcagtagacaaaattataatagtgtggagatactgtcattttaaaattaatctgaaaaacatttattgagtactttcaatatgtcatcagacaacttcacctgtctttgcgtatgaagtttttgtttgtgttttgcttcgattagttttgtaaaaggagacagcaacccaaggactttatagctataaaaaggcaagggtggttactacaagctaaatatgagaaaaaaacagttttgattcattccttgaatgcctccatcacagagcagtttttagcaatggaagtaagattgtgaaaggaaaagaacagggccctttacagagctccaggaatccttttgtggtactttcagcaagtattggtggtagaaaattaatagatataataaacactgtgaggttggctggcattttatctatcccttgaacaggtttaggaaatataattgacttgtgtccacaaatctgaaatacaatttttttgtgtgtaatagtaattttccctgcagctttggcattcttttttccattaaacgtctcagttttcagtgaggggaatacatccttggtcctactttgtcattttgggatgatttattttaaaattacagtaagggactttgttcggaattccactaggctaatttcaaacccagtttgctgactccaactcgccataatgttccccacctccagcacaccgaacaggaagtggcatactcagatgccaggaacaaggcgattgctcagatggaataacacttggcagtttggaaaaatttgttgatgtaagctgaaattgtaggttagatactgacttgtgggatacatttctgccaattatggtccattgtacagtcaaaaatgggaaaaattacttactgcagctggctttttggcattgaaatcactgatggaataatcagagggaaatcttctaagttatcataaaagatggattgtgacacaggatgtcagtttccagggttatccgttttacctgcctcacatgactggaaagctttttgtttaaggaaagaatcaaagagccagagaactgttgagcactccttgacactgacttgcccaatgataactgattcctacaactagccttcctgtcctgctacttcaggggcctatgtttttaagagctgcagccttgggaagattttttttccgtgcctctcctgtgtccaaagctcctgaagcatctgtaacttcctattccaggagtgtacacattctgtaactagaagcctacagctgtaatgctgaacaccaaaataactacagttgatcactggaaacatgcctaaggctgaacataatttttcattttcattcatggatttgtacatattctaaaaaaaagttcactctgaaaataatatttgcataaaaggaaataagagaaaacatactacccacccatgtagagcaaatgagctacatctctttattgatgaattttaagtcatttgggtttttccatacttatttctcattgaatgctccttttccagaagacctcacagttgtctgactgtgtcctccatcacagtcctcccagtattcaggacagatcttaggattcctctcttgagggtcacgtatccctgctttgtaattcacctcctctgtcctctatttcaggatgctcggctctaaatacactgcttgcctcaaccttccctttggattgtaagttccttaaaggaacttaggcagccgatgtttcagcctccccagaatctgcctcctctttttctggaaatagtaccttaattactcaagagaacctcctctcccactttgcatacaggccaagtggcatcccaattaagattttcttctcgtttctgcctggaggtgatcacatgattcagttgaggctatccagattatctctgccctgagaatttgagctttgagtagaatccctgtaagaatggaaaagagagagatctgattcctcttaggagagttttctgaagagaaggcaggatatcctgctgcttgccttgacttgcctacttcccttcctttataagccccggttgagtagcttcactttagagtatgcgagttgacgcatatcttgccaatacatcttttaattttgtcccagttggcccaaattggttggtttttgttgacaaagtatcctaatacagcctccatcttccagttcctatttatgtgtcatgatgatctgaagcatttcaaaagaatagtgaaggttattgcataagattcagaaagttccagtattcaatgggatcatagatatgaattaaaccaaaaaatattctttattatacaactttatttcttcccagagttttagaaatgtgtgagtttaaaatggagagttcgagcaggaaataactggaaattcatgaccattatctttaaaaatgattttttaaaaattttagaatagttttaaatttactgaatttttgtaaaatagtacagagtttccatatagcccacacccagttctcccactattaacattttacatcagtatggtagatttgtcacaattaatgaacaaatattgaatatttttaactgaagtccatagcttatttagattcctctgtttttccttaatatccttttcctgttccaggatcttatacagggtaccacactacatttgaagtcacatcctttaggctccttttggtgtgatagtttcttagaattttcttgtttttgatggcctttacagtttggaagagcatggtcagatattttgtaccatgcttccgattgagatttgtcatatgtttttcaaaagtttagactggggtaatgtgttttagggaggaagaccacagaggtaaattgccattctcatcatcacatcaagggtgcaaactatcaaaatgcttattgctgttgatggtaactttgatcacctggctgaggtagtgttcatcagggttctctttcttttttttcctccttttacacattgcactctttggaaggaaatcactacactgtgtgtagcccacactaaagagttgtaaggtgagagacagacaggtacaaagaaagaggcagttattaattccaggatttaaaaaaacaagatggcattatactccacctctttaagggtgtagtttgtatatatatattatccataattcttccacacaggagatttatctattttccttttttattttatagcttatttatattaatgtagatacatgaatacttattctataagtactggttataatctagtactagtttatttattatgttgctcaaattgttacagccttggccatggccattgggaactctttcagtggctcttgtgtccctttggcatactcccattgttgtggggttttttggtttttggtcttttttagcccttccttactttctggcaacacaaaatgctcttggcttatctctcatacttcctgctccagtcctagaatcagccatttctccaaggaaccctggttctttttagtggagaatggcattaaaaatatgtatctggtgttagttatgctcattacacctagagtgtcattgcttctaggtcttctcagctgaaagaacaagaagatgtatgtgtgtatactaacccatctgtatacacatatctataagtatttctctgtgtaatcatttgtatctattaagataaacatgaacacatactgatatctccaactctaatctttcaccacattctaactttgtcctcttgcttttctgtaagatcccaatagtgaaaatctggttcccttcacccaccattcattgtccagttccagcatagatgtattgtttcagaattgttaactcatactcctgtggagaacagctgtatcaactagagtacagtgcttatagtgcagttactgttacctttagccgtatagagtgtactcttagtgtaccttattccaaccccctgcagtgacgttgtttcatactgttctctttaaaattatgttttaaatttatccaggggataatgcatagctaaagatgacaattcgtgctgataggcttataataaaaactagcagcccctttctctcactccttgtgcacctttacctgttccccaagaacaacactttcaactcttttagctgttcacatcaatttgtctaaaatctaaataatgtactttacagcttgagatatcaattttaaacattatacattgatttcctattattgtaggtaaggatttagctttattgtacctcctttccctgacctatttctttacaacatagttatttcacattttttattaaatcaacatttagtgtttacattgctttcctgtttgtttttttaaatcctgggaccaataattgactctttctttgtacccatttctcaccctataagacttttcccacatgatcaaacttaccagacagtatccagtttcttcttactcctagttcttacttcccaggaccctctgtttactcaggctgcttcattgagtgtatttatgcatagctaggaatagggctgctggtgtctgggaactgaatggggaaggagactaggtgggtggggggttctcattgtcttctatgtaggctttcatttcacctccttgttcttagattgatgtctcacctcacctcaccttccactgtgcccaggtcactaagtcacaagcctttctgagtcacttacagtgagactgatactactatctcctggcattggaaggatgtgggtttcagttgcctcattgggcatgaagggcttagggacctaagggtgtatatgcttttcatactgctttctaaaaaactttctgctttcaaccctatgacttaccctgctttagtggtatgtggtacctctaattcctgcaccttcctaaggttcttcgcagtaatgcatttgtttctctcaggtataccctaagattgccccatgggtacataagttactctagctttactgtgctgagtcagtaagaattcctgtatctgcttgacatcttcattttgtgtggttcagtgttacagatgtctttcgcctttttttttgtgctgttggttgttgtgagaggtgattgtggaaagaaaagggtgtgccaagttaaacctgaagtcccatacctggtctacattttgtatgaccacactaaactcagctcatgcgacctctttggagaaggtactcctgaatcttccaaagtaagtttctttgtctttggcttccacgtcattctgtctgtggcacatgccatactcttgtcattttccccactagacaataaacacatctagggcaggaatcatatctaactaactaacgtatgtgtactgtgaactctgtgctgctgactctactagatatcctcaatgtgtacttacttaaatctaagaatttgctacattaattgtaaactaaaacctctgagatatattatgttgctcaggtaccatctgagaagttatgtgtcaatgttgggctgaaactagaatttcacgttttaaagccttaaactggttttatgtcccacaactatgcggcccctggaaggtattcttgtgtgacctagaaaagattggaagaaattgaggatacttcaattagggaggttccccaaataacttgatttttctaattagatagagatatctttcatatttaaaattttatttctgtgcagatttgctgtgactttggtgtggcctaatctttagcagtaatcactttatcagtgaaatttaacttagaagtccagttagggttaagataaaaaggccacatgaggtaacaaatgagaatatgtactctggagttatacagatctgagtttgaactttagctccttcacttaccaaataaataagtcatcaacttctttcagcctcaattcatctatgttaaaattgggataatagcaatacaaacattattggtctgtatgaagattaaacaatataaaatatgtaaaacagcataatgcctggtatgtggtaagctttcaataagtgttaccttcatttgttatatatatcatgacagttaatacaatgctgagcgaatatttgatgattgtctgaaataacttgaaaaagtttagtgaaaaaattgggggatggaggggttgggaactgggcacagacaattcagccatctaaggaagcagtggcactttcttcactgagccctattaaattgaaagattgtgttctagcaccagggaagagtagctatatgaatcatttcttatgatctaaagtccattagctactccatttagctgttaatgttgcgaggccattggcggaaataaatatgttatttggtaatggacttgttttcttaacaattataatatattctttccaaatgctgtaatttaattctgccattgtgctaattagtcagccgatcagccttcagcattgtttcaatatcccacccaccacatttttatattaaagctcatttaattggtgttgtgggttgaattctgttcctccccaaattcacacataccctaacccctagtacctcagaaggtgatcgtatttagagatatttcatcttgaaaagattaaaattaggccattaagctattagggtggggtctgcttcaatgtgacttatcagaagaagaaatttggacacacaaagggacactaggggcatgcagagggggaccaccttgtgaagagacagagaacaggcggccatctgcaagccacagaaagagacctcagaagaaatcagccctgccaacagtttgatcttcaacttgaagcctccaaactgtgagaaatacatttctgttgtttaagccaccctgtctgtgggattttgttacagcagctaagcaaactaatgtggttggcattgaggagcaaaatttagactggaatttctgatttattttattctgtatagcttataaagcacttatcacacacgccatttgaacttcacccaatcctataaagtaagtgttattattaactcccgttttacagatgaagccattgaggctctgagagtctacacaaacacatagctgctcagggggcaggtggaaattgaacctgggctatttgatttcaatccccctttctttttatgtttctcatttctctccccctttactgtgaatgtagagcatgcacctgttcttttctattgcagttcattcatttgtgcaactgacaggttaccactggtgactgtggattgctgcctaatgctgggctgaagaaaacaacaaatttgccaatctcaaaagagagcatttttatttattgctcagcttccagaacctaatgcctttcaattttctgtcattgttccactgaaagtgaagaatgtaatgttgatatacctcttgttttttctgcttttatgccactccatgtggttagaccaccttttaggtgttcattcattccacaaatatatactgagcacctgttttgagccccgagtttggatgtcatgtttttgaggcaggagttaatgtgctcagcatgaagagctgggtctgcacagaaaactgctgcttcttgagccagggaggtcttcccatgatactatattgcagcttctttgctgtaatgaaaatacagtacacctttccccaactcccaaattaagctttcagtgttcttcattctctgaaaaacttttatagaaattctaagaagtgtgcctcaaaataatatagtaagcaacctgatattactggttttatataatcttagtgcactatcttattcataattaaagttacaacggtgactatgtggaagtatcttggaggagaaagtgaatagatgaggtggggggacatttgagtaataactttgattttggatgtcttctctactatttttagattataatttaaataagttcatgtgtattatattatttcaccaaaaattttactttaagatatggagaatgctccatttttccccgtaagagtagcaataatttttaaaattgtcttttaaaattagattaaattacttaattccagagacctgtgttgttcttgtgtgacaacacagagtatgcaactttaagttactggccgtctaattaaaaagatgtttccaaagtatgaccagcattggaatttgttcagacccatatttataaacagtaactatgacaactcattcctcccaaccatgctcaacccctcatactttcccaactgtctgttttacaagatgacataagtagagggtttggaaaaaagaaaaaaaaatctttggatgataaacgctttttgcaaacagagcctataaagctgtttgttcagcagcatgtgaatcggacagtgggagttcatcagacagcaaggattaaccccctaatttgtttctctcttttggaagagaacagactgctgtgaattccgtgtactcagcctgagctgccaaacatgattgaaaactatttgactgactggtggccaaaacatgaggcagggaccattcatcattttcctgctcttcactaccccatataataagttttgttttgtttgaaaggagtaaatgtatgttacagttttcaaaccaatgtctccgacaacctaaaagcatttcaatattgtacccttttccaatagaatggaaagatgctacatatctgtagcaattttaaccaaattccttctagttacctccatttccaatgcagaaactcctctcaagtgaatacatacacaggttataatatacttgatgagccagtttctttaggatgagtacatacatgactggttttgatttgaccattgtggtgtgcagtgggcttactgtgtccataccagtgtcagaatagtcagtcctctggtgcttgattgggtggcatagcccataagattagctgacttttaaaatcaaagtaataggaggactatgcaatggagacaactcctcaacattgacccatcccctcagtccagttccatatgttccattgggaattaatttcctgcaggcatagaggagtcgtaagagttgcctctgccagagaagccccatctttccttgagccaggagtcagtagaagatagtaggctacaaaccatttgactatacctctatgatctcttgccactgaatatagaaaaggagtataaagaagcagtataaaatatgaaattgaattgtcagtggctagatagttagacatatagtctgggtattcaaagggagtgccttttaaaaatgtgctcaacccccattagcccatgaaatgcctcctttccgttcctacactggcatatctttcaccagaagcatttaaccagattctagaacctgtccattgggaataatttagtcaccttcttcaacttatttttctctttttcccctctcaaatgtcattttttttcacatggctccagtctcaattctcctcttattttatccattgtccccagtaacacactcttctttgtccatctagtcatacatcaatccacctatctattcatccaatcaactattattgagccccaattacatgcatgtgaagcatattctcaaagcaccatttccctggccaagctaggatgataatgagagataagatgctctgtttcagtttggttattcaaagcagaccctataataaggaattgggagcaagtagtttatttgttaggtaattccaggaagcaacagtgaggtaaagaaggagaggaaagggggaaaaaaaacaacaaaataataaaggtgcattaagatgtgagaaactgcttataggcaactgggtttagtcctgctgggaattttttgagaaactttgtagaacgtgcctcagaattgtgcccctgaaggatgagaaagctgagatgtttatccatttacttcagtcctcactggctaagagttatcttgggggcattaaatccctggcattttcaggatgccctcccagtaggctttgcaagccttagtactggagagagccttcaggcagaaaagcagaagacaagggcatgcatagtttctgttcacctaggctgcaggtgaactcaaaagtggatgcagaggttttggttggggtgggggtaggggtgatggtggtgattccatagcatctgcttcaacctctgtgttaccacccccaactgccttaaatggaagcatatcagagtttttcattttctggtaaagagtaccagggtgggcatttactctatgtaatgtgcagaaacacagcactgtgtttagaattggacttactcatttcctgagtatatgtatagcttccctttctctacaacctcttttcagcagatttatgcagacaagaaaaatattgtaacccaaagcgccactgcaaatttccctgtgctgacattaatcatgcccatttgatttattatctatcatttgaaaagaatattttgcaactcttgtgcattgatttttttttaccaagaatgattacatccatgcagcataactcttctaaaggctaatgcagtttgcttttatcacccattcactccctaattatggtgttttcgaaagcagacactatacctggaaagttgggagagaaatatttgattcacccatctttcagagaagaggagatggatttaaaccaggctagatactgtaactgattattgagtatttggcttggggggcttaatttaccagctaccattgaattaattgaaatataaacttctgtggatattaatactttcaagagtcaaagtttaaatgccatctactttggatccgttcaaaatattttcactaaccctttataatttaattgactttttaacttttttgttctgttttgttttaacacagcgatctacccttttatgtaaccccttctgctccacatatcactgggctggggccaaaagtaactgagtgactaatatctgggaaatatttattgaatgagtgaaagaaatccacttgggatttatacccaagaacaaatgctcattaactgtaaattctccttcttttgaggttcatatatagatgctctatatgtgtttatcaaacacctatcaggttatgaaaagaatgcaagaatgcctctcttttctctccatttatccaaatctatcatttaaggccctggcataatttctccttctttaatgaagctgcttcaatttcttccaattcagtgcttcatatacttggctgcagttggggagctgtaaaaaatcctgttgactaggctacaccctagaaccctagatgatttaaaccagagcctttgggtgtggaattcaggcctctgctttttttttttttttgagacagagtctcactccatcccccaggctggagtgcattggtgtgatcttggctcactgcaaccccgtctcctaggctcaagcgattctcgtgtctcagcctcctgagtagttgggattataggtgcctgtcaccacacccagctaatatttgtatttttagtagaaacagggttttgccaggttagccaggctggtctcgacctcctgacctcaagtgatctgcccgccttggcctcccaaagtgctgggattacaggcatgagccaccgtgcctggcaaggcctctgcacttttttttttttttgagacggagtcttgctctgtcgccaggctggagtgcagtggcgcgatctcagctcactgcaacctctgcttcttgggttcaagtgattcccctgcttcagcctcctgagtagctgggactacaggtgtgcaccacaacgcccagctaattttttgtattttagtagagatggggtttcaacatgttagccaggatggtctcaatctcctgacctcgtgatctgcccgccttggcctcccaaagtgctgatattacaggcatgagccaccgcgcccggctggcatctgcatttttaaaagctcaagttattacaatgtgcagccaaggttgagaacaccactgtacctggatgtgattgctctcttctctgaaaacctaggaaacctcgatattaaaagccacctcttaaggacagttgtaattggcctagtattctggcttaagttactctgaagatcaactagcctaaccacccttccaattccaagatacctctgacagccttctggttgtccagttcaaatccttaatactgacatggaacttattcccagtgcagccttgcccatctttgggcagctctgaccagtccagatataagtctgtctctttgtagcttcaagctattcttcctgtctctatcactttggggtggggctgggagtgagggaatctttctaacaagtgttttaaatgtctgaataatctatttattcaataaacgtttatggaatgcctcctatgtattggacactgggctacctcattgaaaagcgatgtacaaattcctaggaggatttgcaagccagtcctcctttcttctttttcttcttcttcctcttcctcttcctcttcctcttcctcttcctcttcttcttcttcttcttcttcttcttcttcttcttcttcttcttctcctccttctccttcttcttcttctccttctccttctccctattcttcttcttcttcttctctttttattgtactttaagttctggggtacatgtgcagaacgtccaggtttattacataggtatacacgtgccatggtggtttgctgcacccatcaacctgtcatctacattaggtatttctcctaatgctatccctcctctagcccccaagccccggagaggccccagtgtgtgatgttcccctccctgtgtccatgtgttctcattgttcaactcccactcatgagtgagaacttgcattctgtttgttgttattttgttattaagctgccacatttctgacataaaagaatatctttggctgcaatagtgaaagagaaaatgggcgtaagctgcaacatgagaaatttaggtagcagagcgatgactattaaactttgagaagttttctgtttaacgttgtgaaatctttccttgaagctttaaatatgacatactttcatgtgattctatttatatactgccttgagggcagagggcaatgccctgtgttccttctgagggttccttctgagtgactctaagtctctagatgaggtagccctgaggaagcaagaatgaatgattaagatacttcctgatgatgtttttaggggaaagataaacaaggttgcttcccctgctggctggtgttccccatcgtgcatgcatccagatgaggtctccaaggaaaatcttggtccagcaatgcttgactgtgccagttccctgatgctgatggctttgctgggaaacaaagcacattaagggtggatctaggtcactctggacttcatacctttccaaggcaaggaaaggccaagccccaggggctccattcacattattgtgctcctgaggggttgcgctcctagacttcatcagtgtcactggaaatgatacctcccacagtcatttaatgaggtagtcctgggcatatagcacagtggagataggcaccttgtcaaacaactggtgctgcagaagtgctgaaaaccctatgctgtctcattggagggaaggtaaggggtctcagagactctctcctaggaattagaacatggttccacttactccaacctagaaacacatcagagaggaattttatactccaggaaccaagctaactaagatgtttccaccacctttttttgcctgcttagatttcagatccttctttctttctaatacaccaagccctgagatgacatgggttccttctaatctcagagtgtgaaattttctctctggaatttaattctggtttattcctccaccttgccctgctttatcctgtggcatatgtgatgccacaatgcagttgtgacttccctggatgcatcagcgttaaagcagacacaagcactgaaaatatgcagggccagaccagcaggtcccgtacagctgaagttcatcatggtgttttacaaccaaccaattactcaattcattttatgggttgactgtgcccatcttttactctcatgaagcattttctatcgtaagacagaaagcgagggaaaagtgctctttcagttccaaaccctggggcatttatgcactaataaccttcctcctttgtgcttttccaaagaatgtaaaccaaagcaattaaattaaatggagttaacattggcatggtagcataaatcaaacgtcaggaaattcattattaaggggttatcgttcctttcttatgagctatctagtatctgccttctctgaggtaaaaataagccaaaaatttggtcctgatataaatgaggggactgcatgagagagagacagacagggagagagagaccttgtgtttagcagcagataggcagacttgtgatttgtgggcgaaacatgtttatcagatgcttgtctctttgcctcttaatcaggttcttcttcccatggcatgctaagcaggcaaacacagttaagcagtttacctctgtactcaacagttccagaactgaaagtaaacagccttgtgtgtttaggctgcagccaccgggctgtgctctgtagagctgccagatttctccacatcactgattctcccagtgaaaagcaaaggcttcctcttcattgtgttcacagactgaaagttgcttgcaggattggcttccgaagttcagaccctgatgaaggaaaatgatactccgagtctgagggtggcaaatcagaagaaataatttgtttggattcgggtctgattttaatttcaggagtctggggcctgaaagctttctgctgagtctgaacacaaaccccaaacttctcaactcaggttgcttttaaggaattgtaaactatttaaaacctatatatttaaaaaattataatttattcccaatgagaggatcctctccccagccaacgtctattttgcacatgactttctaatgaactgttaacaagcatttatattaagagcttgctcgggcttttgaatgatggaagataattctgatttacatgagtgatagtttaaaattccaggtgctttatttctgtttattggggtgggacaggggaaggactaaaactgcctacaaagaccctttcaaaggcaaaggaatagaatgtataacattccattttgtcagcatgaggaaggtcttatttaagactctctgaacagatgtgaccaattgtattggtgaggaggaatgttggaagataagatgttctgctctgtttgaatgtgtatttttagcagtgtcctattgtaaagaagttatgcccattatcttttgacttgctttatcagattaaacaaagatgctcatctttctaggctttctaatatgctccctcaatgcaagtctctcagctccaatgctgtgtgttagagtgtgataccccctcctgttactcctatttggctgaatttcagaaatccatttagatactctcacggttttgttcagcattgctcaaaacatggcttctcaccaattctgactgtctctctgaaacatgattaattttttctatgtctatctttacactgtagagtttaggttgaaaatatacttttactgtagtctcttattttcaggaatgtgtacgtaagcacccaaatgaattctactctgagatacaattacccatgtatgcttccaactgaaagcatccactgaaaaaatatagatagagaattcagtagctctgactgttagagcatctcagtaggcaaaagtttccttacagtaattgctatgctttggaaacagcattttctgtgtactaagaactcaagggagagctgtgttcaggtcaaagcttgggtgaggtataataagaaagaaccccagctggagcagtgaaaaaaccaagaggcgagaattttgtcctctctgaacttctcggttagaagattaagagggagatataggttccctgagacatattcagaaactataggggtttctatggcaacagaaatgaaaaatgaaaatacagtctcatcttctcttgttaagatccctcagtttcacatgagcccaagatcaaggagtcaaatacagagaaagtcacagagcaaagagggagccatgtttcttttcgtccagcagatggctagcaacaagaactgcttagaagaccttcacttgttgaggaattgagagaactgttgaatttccttttttccaggtgatttttgggaaagattgaaaagttaatccaaagagttggttgagatagagcatttatctcacttggtagctcccccagtggaattgaagtccacagaattgctgtctcagaagtttcattctttggttagctgtttccaaagtgtaagtgagtccttcacaaacatgattaccaaaagtaataaataaatacatatctggcagtgaggatgattttttttggagatttttagttttaaaccacgtattttactggaagtataatgcacccatttcccagtggttacatggaaagacttcgttcctcttctggttctcccagcaatgacttttcagtcactgaagaattcagaggacaatgacaactcccttcacaggatcatacagacacctgtcatttgaatgcctgggaaaaggataggaatggagatgtatctggttggactccaagataaggaaaaacttttgatgggcaattggaatgtcagcagatttatatctccttgaacttgggtctgtcaacactgccatgagaaggaagatgtttttcccacagagagacatttatggggcaaagacagacatcagtgtgctaaatcttataaaattcctttgcatcatccaccttgacagatggtcttcaggaatgtgctgaacctccaaaacagagggttgggaggaaactcaagagtgttcttcccctgtcttctgtcaatgactacgacacactgaaggccacattgaccttccatcaaacatacatgcaggcttcaagccacccttccttcttccccgtaagggacaggttgaagcaaagatcatgctattaggtattaggtaacaagcctccacttacagagtatcctagggatgaaaacctttttgccttatagccatgctagcttcaaacatgagataggtaaaatcgttttgttttcaactttctttccatttacttccctttaacttttctattatgccacaaaggacaagtatgtgttttccttataaaaagaagttttggcaaaaaatgaagttttggtcctatagttcatagtggccccagaaaaaattgccttactatttccacaacaccattgcttgttttttgtttttgtttttttatatagtcccacactttcttttgctcctgtttcatttactaacttggaatgctcacgctcctgggcctgatacactcctaggatcacctaggctgggtgaagcttggccttcagaggagtagacagagcaggaaggatgaccactatggtcttagcttcctttagtatgacttccctttcttcagctggagtcccttccctaaacacctgcagccatcctgtggctttgcatagtggagcccagggactaacacgacagtggtctgagtgtctcagacttcgagactattgctttctcctctgttccaatctccaaaaagagttctatgagaataattgcccaaagagaaggtacttcatttggtagggctgggaaaagaggcatcagatagcatcttgatatggtgaaagatttgaacagacaaagatctatctggtgctagtttagttgccttgaatcatcattacagatccctctggactatttccctttagccaatcagcaacttccccagggagaaacttgagatcttttattctagatttctggatccctaacttgttccaatgttcctttctttttaaaattatttttagttttcaatttaaaattttttcaaacatattttttaaaaatgcagaaaatcagagaaagggcagcatgtatatattcactacccagattgaacggttgttaacactttgctatgttttcatcagataacttgggaagaaaggaaggaaggaaggaaggaaggaaatagtgcaaatatagttgaagttttactcagtatttcctgctctcttccctttcttccctatataatttacttaaaagtttgtatatattattcctatgtgcattttgattatttttattacatatacatgttctcataaaccacatagttattgatttttaatattataactttaaacaagcagcatcataaagtatgtatcctttttcaacttgatttttattcaacattattattacatttttaaagactcatccacattgatatatctagctctagttcatccattttaattatacgaactagagttcgttaaatggtatagttgctctaaatgccactttactatacaaagctgattatgtttcttgcctactcataacaacccagccccaaactgcctttccagtcatcgtgaattacatgttcttggaccctttccccttggtcctcctgtctttcaaaagatgtgctacattatgtgatgaattaattgtctgtgctttgaccccagtgagtacaaacagctttgtgagcagcctctttcaggtaagagagttcatttgagatatgagattttgtttgttcaccattatctttccagcatctaggagagtgcttgattcttaataggtgtgcaatagatatttgttggacaaatgtctgcatgagtgagtagacggctgtggaattgggtttaatgctgtgattccaatgcatataataaggaattaagttctttcctaaaatactcacatcacactctagcaaccattggcttcttgctagttgatttattctctaagaattgccacaatagattaaagagatgatgtttgtcaactctttcagatggtagaatccttgcttgcctcagagaggaccactgaatgtttgcaaagaactaccacaagccctcaccatggggaattggtgatttgaaaggcctggcagatgttacactcttttgccatctgtctcttggaagtagcttcaatttggctttcagtaggccccagcaaggtcatgaatatcagatttggtgagaaaacgccaagtgtgtagcttcagtcaaagggagacagcttttcccttatgctgctcttctcagcagcccaggcccatttgttcttcctctgtgtggaactggatgctccctcctgtagtaaatggttagagggtccagaatgaaatggaaagtggtcctgtatcatcagcagtagcttcttgtggactttgtcaccctcattcattcaacaattgtttactgaacaagtaattgacaagacattctaacaccgacaagttgtgtttaattcagaggaggagactgaacgctggtgtttccaaggcactaaataaatgctaaaacagggagaggaagcacacagggcagaggaacacttaggaggagcaccatactattctatggtgtggtggtcagcaaaagcttcctgggggaagtgaccttatctgtaaaatgaaatgggattaatacccatgttgcaagatggagccaatgtaaggtaatgtctttaagtttcctgctgcttgcttagtaatagcagtgatgaccatgtggtattgatggtgatgacagtgatagagaagaaaaaaaaatggcttcacaaccagatagtccggtttcaaatcctagctcttcttgtccttagctctgtggccttgagcaaatcacttggcttctctgtgcctcatctataaaatgcgaatagtgctacgtaccgctaccacaactgtaatgattgcagaaaatgttcacaaggaacctaacagtgcctagcacctggaaggcattcagtaagaggtgaaaatgcaacaggagcttgaagagaaggtagcagtaggagccatcagtggatatggagggaagagctctgcatgtggagtctagggacctagattctcatctgactatcactgagaagctgggtgcccttgggcatgtcatgtctggcattctctggagtctcccatcagtgcagagaggcccatccatgaatcaggtaatttttaagtgagagaaacacacaacaagcctaggattaaggatggtagagagattactgtgtgttgctatggcatgggaagactttgtggaggagaaagccctcgggctggatgctgaaggccaagtaggtgttagactgggggagctaagtgaagagggcattccaggcaggggcatgattgagcaaaaggggccaagtcacgcattaagtatgtcagccgcttccctcatctcctcacctctggggcagccttactcgtggagaagaatggataataggaaggtcttgacttcagctcagaagtttgtttctttgatagtcaggactggttctgggaaaattgtcaagtcattgaagttagtctgtgcgaccattcatcttaatgtgagcaacccacgttttttgcctgcacattgctgccacctgggctaaacaagccccccactcccaccccactttgcaagcctacaaaatatgccctgtagagcagctcctttttgattcttatttccaccctccaaagcatacccagaagcacagtatgtcaaagcttagagggagctcggagttcattattttaagcccccttattttattatgaagggccatacccaaagataagcacttacgggcagaaaaggaacagagacagatcatcacggtctcccagttgtgttctttcttccactatgcagcctacatttctctctaccatacattttgattacttaacctaggacatcaatacctatgtattaatcaggactcttgggattttaaacgtcaaacacctagagaaacttgtttgataagcagggaagttattggcttgtgtaactgaagagttttggtagggctgaatccaggtttccagaagatgtcaggtgtttgcctctccttcacaaggcttaacttttctcagtgtggcttcattctcaggcaagctgcctacaaatagtgtccaaaaggccttaatggcaacaggcttatatcctacaaatagtgtccaaaaggccttaatggcaacaggcgtatatcctaccatcttggcatcccaagaaacatagagaaatgtctctggcataggtcctagatagggttttcattaatttggcttgagacatgtgcctactttcattgtgatggggttatagaactgtgatagtcttaaactaggtcaggtacccaccactgaaaccaagactcaaggtcagtctcacccaaaccatggatgactgtggggaagaggaggttcccaagaggttaccaggtttctgtttccaaaagagagggaaatagatgttaagctagtatgtgttcactcacccacacatcaccctcacacaacccaccacaagctgataacagtttaaggtattgtattcctgatagcattagccttttgtgaaggactgtacgtgttttagttgagtataacatggaaatttggggtaccatggaaaggccagtgagggggttagagaaggtggagattttgtatttcagggttttttaggctccctcaaattatagcacaaaatatctactttgtggcatagcataaaatactttacttataaattctgtcctgatgatagccaggaactcagcctgagatgaaaaggtttccattagtgaaccacatgtagacaattgtaagttaatgctaattcattatcctcacacctgggctttccaaatttgtctacctcttttttttttcttaaccatgtattgcttatctttctcatgaacataaccaatgtcttatgagcccaagtcaagtagtgaacatcagataggaaattataattttgtgtatattctttccctcatttttgtggcctttttgtgtagttctcttgtgcctggagaaaactcagggtttgtgtgttaagaatgaagtgcttgcattccctcacccagatgcagtgcagcaatggggtacagtgggaccacattggaaggaggtaagattggtggcaggtagttaaaaggtagcattgtttactgtgggtctaatgcagtatttctggactgaatggaatggaagttttgcctaacatcttttagaaattgttttcaggtctgtttcaattcctaatgttcttttatataatttctgactcatttgcttaatggtttcatttgtgtttaaaaaagcaacatcaaaccttcattatttactttccgtgatgctttaaataccacagaattcagtaaggccatcaaagagacagagaggccaacattaaacattaatttttattactttggcaaagaattcttgagataattcagcacagaggaaccagtacaggtctctgatagctgtaccaagtgctgattaactcaacctcacaaaatctcttgcctgtcaacaattagtggaaacatacagaaatatctaaatatcccaaagatattggggagatatttggaaagtatatgaaaacatttagaaacatcagaagtttgaaaaacaaagttttccacatatatgaatgagactggggaagggagtatggtctgttttcttctcacaattttatcaccctggcagttattggtggagagaaggttctcagtaagcatatgacgtatctattactttatctttaccttgatttctccattcccatagctttaaaagtcattagaggagataaaacagggtcatttattttgtattgtcatatgtatggatttagcagcatgtgatatctttccttccttccttccttcctccctctctcctccctctctgggtattccctcctttccttcctccctttttctttccagtatttaatgactcctactctatgtcattgtctcttatgactgagagatgcataaggcttagtcttgccctcaaaaagcttacagttttttgagaggttacacacaagtaaatgggcaatttcaatatagtataataaatattatgatagaggaagtacacagtgcctttgggtcatttaaggagagcacttaaactcagggaatcaggaaagccttgtcaggggaagtgccatctaatctgagttttgaaggacaagttgagttagccagagctagttttctatggctgagtgggccagatgggaggagcctggacctgaatttaatctccctgctggggtaaggcaggtgtcggtggccacccccagcttcaggtgctcagatagagtccagtccagtagtcatagcatggtagccaaaggattttgccttgagttcataatcaagaaacgcctccaggccctggggagcaagagaggagatagtagtactggaagtctgccagaccttagaccttaggagagacacttgtatgaacatggtcaagtgaaattctagtgtctggagaccatgacacagctcagcctgcacagggcttgggacgtgagctttgtatgcacagtgcagtccaggatccagccgacagtccagttgttgcctatacccgcagtcaattgccatgttttttaggaagcctctgtcgagcgactctagaggtgtttctcccttccctcttattactaaaccttacagaagctaagcttgcttctaagatatcttttaggtttaatattcacaggattacagtgtctgcattccttagacgctcctatcatgctgtgctagtcgggcactgtgctaggcacagggaatgttgagataaaaggaagttggtttgttgtttaaactacccagattgtgcattgttaaaaattattatttttttggaactcttaaaattttgttttgcccaaaaaattacatgacactttcctcttagaaataagttagttatataatacagaaatgtaaaggccaaaacattaatattttccttctttaaattctagcttctttcaccagcgttaacaactgataaccttctcttgtgtatctttttagtccattttctatgcttgcatatccatatataattgtatcagttgagattccagtaggaaacagatggtacattcaaattagaataatttagaccgggtgtggtggcttatacctgtaattccagcactttggaaggccaaggtggaagaatcgcttgaggctaggagtttgaggctgcaatgaactagcatggtgccattacactccagtctaggtgacagagcaggaccctggtctctaaacaacaacagcaacaaaaccaaattaggataattgaggtttagtttaataaagggactatttatatgatgtagagagggtatagggaaagcacaggggatcatgattatcaaccctaaatctgaaggggcacagagaggaagtggtcatggaaacctggacacagaaagggtgctgcagaaaggaccctctaatgggcactgagacctgtgatggagggatgcagccagttcttagcaaccacaggaaaggggctgggaataaatgcactccttcctctctgcttctaagcgcccccattgactgaaccctatgggaagccaagggaacaagaaaacctattgatgtagtccatataggtcagcccccttagccagagagctgagtggagaaaggtggagagtggatcagaggggcaaacagaaggtctccagtacaaatacatacatagcatatagttttaggagcttttactttctgtgcttccttgttacagaaatgagattgtgctgtagtacgattctgggactttttgttaacacaatttgtcttgaagcctttttgcatcagtatgtatggatctaatttaattattttattcattggctgcttagtatttcgtcatacaaggtatctgaactttttaaaattatgtatatgtaatagttggtatatacaacagaatatgtaccacctatgtgagttatgaagcctagcaataaaacagtcatctgtaaatttatctctcaacctaagatcactaataccatcgaccttagtcaatcaaactacttgacctcagatcatcaggcaatcaggcattagttagaattacctaaggagcatgcatgtgcagttcacaatagggtttgggtttctatgagaatctaatgctgccactaatctaactgacaggaggcagagctcaggcagtaatgctcacttcctgttgtgcggccatattcctaacaggccacagactggtaccagtatgctagctgggggttggggacccctgctatacagtcttcctgtgtcccctcaccccgccaatgctagtctgaagttttttgtgttaattctcttatactttttaaaaatagtttttccatattatgagtatgttgaaacaatatattatatagttactttttaaaaagctttataaaattgccgttttagttgtacatagtcttttacaatttgcttttttaacatagcattcatattgcagtgtgcagctgtgcttcatttattttcatagcttataacactccattgtgtgaatatgccgcaattcacctctccattctactgttgatggacttttgggtcatttccagtttttgctgtttcaaacagtgctgcttatgaacatttttgtccgtgtctcctggcacatacatacaagagttgctctagggtatatacctaggagtggaatttctgggtcacgaggtttacacatacttggctttgctaggtaatgccaaattgttttcaatgggattatgccaatttacattcccattagaagtatgtaagaattctggttgttccttttcctccttagtgcatggtatttgcagaaggcttaactttttaccatcaatactcttttcagggataccaagcaaaaacttaatgagagtctgactctgttatcataataaatatttttctacttttctctgtaaaaatgattttctctttcttgccctattttttttgcctcattgttccctaagtttatgtcatctactaataaattatatttaaaaataattaatacattaaaacaaatctgccaaatgggcctttcaattctttccaactctaaaataaatgtaattctagtagaaatccatatacaaatcatggttcataaaactgaaggttaacattgctaccatatggagaagttagctcacatacaaaaagagaaaaccatcagttctccaaatatttctttttaccaaatttgactttaacagcaaactggattgtgtgtactcttgaaaggaatagtgctccatcttgctctccctctctttcttcatccttccttagttttgttctttctttctttgcttcttttatgtattcattcactgattcactaaaacccagtggagaagacaaatgaattattactgtgtagcctgcaaatgggatgatgaggaatggacagatgtcttttggagtgagagaaggaaacttgacttctgtatttcttgagttcacttcagttcttaagataaagtaggttctactgagtatttgctaaatgaatgaacaaatcaatactctaaaatgttttcagctttttactcattgtagtgtaggaagagctacatggagttgaatttctatcaactagcccatcttttattactggagttagtcttctttggtaatttaatactcagagtacctcatatgatctctttatcgatgccttcaggagacattaaacgttctatcaattaattatacttaaaaagaataccttttggattcattcaagcacttcatcttctttccccaaatcttgggaactggtgtcagctccttaaaatgagccagcatgctttttcaccctcccatataagtaagagcttgtaatcacccagtgtttctctgacctagaaaagctgagaaattcacataaatgaaaacacaggggcttacaaaattgctttcggccctctcccttagaagcatatctggcacttggtaactggctggatggaatgtgggtactacatggagtgccctggtgctgctgctgctgctgctgctgctaggcttatataactttgaaatcagaaagcagattcagtggggtaggggagaactgcttttaacaagctgctgggattggctgaacttgtgctggccttgcactcttactattataaacttgatgtctttctcatttgtaaactttatttgcatgccagagctcagctgaatttgcctgggttcctagtttctttaatcttttgtcctgactggcttgcatgtaaatcagcttcagactttcagctgcccatatattgccctagtttgcactctataaagagttctttctttgtaggctcctgtccaaagcatggcagtatgtcttaaaactgtacaatatggttactattagtagtaatgagttgttattgagtgtcagtatgaggttgagtagatggagcaaccaaggcagcttagaactgagggtttcccagctaacatgctgtggaaccctggaaaatttgccaagctcctccaggtctcctattccatcctgccagaggtgatgtttttctttcctgctaggtatgtcatgaatataactgagaaccatgattctaaaacaattagaatgaaactttgtgattttatttgatgagataagcactgttttcatatctttacatacatactgcgttgttaagtcctattgtcataaccatgaattaaatgtagtcatttttatatttttaaatatagcaatgcaagaaaactgaactgatagagtgataataaggcagataagtgaaagaggaaggtgtttagccattcaagctactgctgaaatagtgaatctctttaatggtaatatatgagctggaatgtttatccttatcctttcctctagagaagattaatttatttggcaatatctaaataactgagaatggtatattcctcattcataacttagagaaacaatttggctacttttgttggcagaacctgaaatagcattgcccttccaaagactgtttaacttgatttcacaagtaaaccacaaaatgcaattatttgatattttaccatatcccattcccttctttcatccccataatgcagggggctgagtttggatttgcaaaccttactccttagcctaagcccttacaattgtttgtatgtaatgccagatgcatgttaaggaaggaatcctatagaggcaggttacttggagcgaagttttcagggtggccagctctgcccagttgccttctttggtcccagcgagatttgtagttttggtttctctgtttgaggctgggttgggtgcagggaccaagcaaatgaaaaacagacccttggggtataaaagaggtgagacataggtcaaacaacctatggctcctctagctgatacagaagatccatcaccaacaacataggtttatggctcagtcccatgacctgggtggaatatccggagcagttctggaaatataccatccattataatcatctgagtgcttgattaaaatgtatattcctttaaacacaaacaacaaaaacaaaaacatgtagattcctgggacccatgctcagattctgattcactagatctggggcgggacccaggagtctgcactgatgcagatgtcacagacaattctgatgctggtgctctaagagccacacttggaaaaattcagtttagtgcctctttgtcattcttccctttggctccttgcctttatttcaggaaataactatgaatatgactttcaatgtcacctctaggagctgcagccagacattcctatgatgtacttatagctaatctagttgagctccatttgagaggattctagatatattacttactagagatctggctttctagaaggctcccactggatccaggtaatgtccagtggcttgaacgatagaaagctggagtcagcagctggccttccagacccatacaaatcctctttctttggaaagcctctagcacttcactgtaaaataacagataatcccaggccagaattttaattagaaaagctgaatgacctgtaagtaaattattaagaatttcaatatcagctaagatcaatggaacagaacagacagccctgaggtgcatctgtagatgcgtgtacacaataattaagtttgttataaagatcctatatactattttctctgtatgtaatggtgggacctattttcatacaatccatagatacaattgaaataatacaaataatacaaatcattgataactgactaccatgggtcaggccttgttctgcacgatttctatatattctgctaatactcataataagcagcactttaagtattattactcttctccttttatagttaagaaaccaaggcacagggaagctaagtaacttgcataatgttgcacagcaagaaagtagcaggctggtcctcttggtttatttaagttaaaatgaaataatggaggaaattaggaatctgaagaaacctccattttcaaaagagtagaaaaatagatacctgaagggcatcgtggggtcataacataacaactgtgagaagtgttgtagctttttgtatgtttgtgaaatttttcaaaaatgtgtctaggtacagtagttgaagcttctaatgcatattggggttaattccaggactcttatcgtcactcagggtttgacaaagtaatagttatttgtattactaaaccttttaggctggaaggttttgtacattaatagatgttaaagatcttactgcagaaattactgtcatgattttggaagccctagtttaacccacattgatcataatatgtctctggcatggtcaagaagttcttttttcctgattcaagtactttataaagcatatttaaaggctggcttcaatctctctggagttatacagcccttctgttagtcctggtacaatccctcttgagaattttttcttttttttagtgttatcaaaaacacagtaagacgattgatattgcttagtactgaatcccggagttctgtctatgatcaaaatatcctctggcccaccagccaagattccaaaagtggtctcattatggttcatacccagttttccatcctacagccttgggttgagagctgcagcctccctccaaagtcccctccaggcagttctgggagttctgaggtgtttctagtctgttcagtccatttgttcatgaccccctgcttctgtcgtctcgttagtatatcctgatataataaaagtttgaaaatataatcaatgctagtaaggaacagagtcctatgctgtaccatttctttctgaagtgtagctttgttattaaaaacaataataaaaaaaggactggtacaaaatttcctgttctggaggtgtggagtttttcatatgtcaaccagctttaaccttttgaaggtttaatgaaatcagcaaatataatccactgtacgagagtggatatgaatcaagtctatcattgttgaacaaacggcattaatttccagtgcacatgtggatctgagttttaaaatattggtttgaaaaatgtcaagctgctcattgttttagaatatttgagcagcttgctagtatactctttttaaacagttgtacttctaaaaggttacagtgtttgcatatttattcctttcaatttaaaaaattcttccagtggcctgggtagtagggaaatacctcgaattcctttttttatggattgtacttcctagagggtattaaaaaaaactccctttcacttttagcagtagctgaagctacaggactcactttacaccccagcgctcatcatcatgtctccgggtgaagttctcttcagtgtccccagaagctgtagaattagattgcttaaagctcgtggaaaagcttatatctcctatgtccagtgtcagccccctaggaagaaaagagctctgggggaactaatgcttgttgagtgctctaaggaaccagggattggatgatgagcaggacggccatgggccctgctctcctggagatcatggttgctgttcagccagggtcagtggggcagagagcacagtcgtctcaaaagtgggtgtggggagatccatgaggatgttggaagcaaatataaaactgagggttttctcattttgaatttccattgttgcagatgtttcataatgcagatagtatattggtattttggtgcatcttttacaacaaacttaattattttgtatacacatacacagatgtgcttcagggctgtctgttgtgttccattgatcttagctgatatctttaagaaggattgacaactatattttaaaaatctaatctatctaatcaggaaattgatttaaacaaagcactccatgccatacaagatttgattgagctgttttttcttttttcccaagatgaaagagtgcctaggagcgtggttatttttgcccctatatccaatttagcacctctttcaagttaggtttgaagttggaagaattacaacatatttctataaaataatctgtttaatgatatgatgtttcatttcttactaaaacaaaacccttcccattaacttgttcgcttgtccccattttatcatatatgcctagggagaagtctccattaactggtttcttcctgctcctaaactgtatcctctttcttaagcaagttctccacactattagtttgctttcaggttcccctgtgtttgctctctgttcaaaactggtgatgctgtgaattgtagtcagctcaagtgacttccaggtgacttgccttcagcagtggctgctcatttcatgcactgcagaatccctgggtcatgctgacctgttgatgataccagcatcacagactgcacatatcaggcctgctttctatgatgctggttttccaattaactttgtgaaaaggtatatccctgcttatgtcttcctggttatccagctcctcttgcatttgatttcatcttcagcactcgtctgtttgccagttttccatagtagaaagatagattttttttcaaaaacgactcttcccttttagttccattccataggacttctaaaacagatacttgcattgctttcatttccaaaacaaaattatttgataattacaaaaataattctagaaaataattgtcatgttagtttgctatattgaatattttttgggacttctagatttaatgtatcacatttcactaattgaaagaaaattattatcagcaagataaatctgtttgggagtgtttacttatttctttaattttctatttttttattatactttaagttttagggtacatgtgcacattgtgcaggttagttacatatgtatacatgtgccatgctggtgcgctgcacccactaactctagttatatctcccaatgctatccctccccctccccccaccccacaacagtccccataattttctaaattaacatgcccctccataattctgaaatccaaattaaactagtatttctggtacctcaagattccctaaatggagcttcctgggtcagtacgccacttaatctaacttgtgaagaaagacttcagcactcaaactcattctgaccctgtggactttgcttcagctgctccctttggctgtagttctctttctcagagcttcatgtggccagctcttatcactcaagtctcaactcaaaccttactttcttggaaagaccgttttctggccgctgaggtctctgccactatctgtcatagaatttgattttattttttcacatcatgtgtcagtccctggaattatttttgttaacttgtacatctactgtcctccaattagaatgtaagttgagaagaacagagccattgtctgtcaagttcattgctgtatccccagtacatagtatggtggccagcacacagtggtttgataaattcttggtgaatgcatggatataacatttgagaaatgctgcataaaatatcattcaatgggtttctctagagtgagatatattggtacagcattttccaaatatatttgactaagaacatgtatatatgccatgtgccacataatgcagttttgatcaatgactggccacatgtatgaaagtggtctcacaaaattataatggagtaggctatatcatctaggtttgttatgtacaccctatggtgcttgcacaacaaagaaattgcctaaatgacacatttttcaaatgtatccccattgtctcctactattggtctgtatgactgtcattatgtcagtaccatattgttttgattactgtagctttgtaatacatgttgaaatcaggaagtgtgatgtttccagctttgttgttttttcttataattgatttggctatttgtggccttttgtggttccatataaattttagaattgtgttttctatgcctgtaaaaaaacaaacaaacaaacaaacaaacaaaaaactgctattgggattttgatagggattgtagccaagcagcttggcttcaaaaatgcattttaaaactttttttctcctttctcttttctccttaatctcaagatgtaaccttgaagctaactgcagaagcatttccccttaaccttaaaataagacttcatgtccctctctttcccatcattatctaactgtatgctagtatctaattatgtgcttacttaaagttctgggacttaatcttgagacaggcagaccaaacccggaaaccctgcttcaaaatttcagataacctcaaggtagctagtcaacaacttggccattgttgagatgatgccagcccatgctccaggtggaccaagacccaatatagcaaccaaaacaagacacgcagatctagtacttagcgcgactcctgcttgccttccatatcaagtctcccctttttaaatacttagcttcttcctagaaattcaaagtggttactttggatagggaatctggccacttccccattactagttttggttaataaagtcactttctttctaccagatctctctcttgttaattggactctgtaagcagtgagtggccagacctgtgttcagttacaagatgacattgaatctttaggttgctttggatagtatgaacattttaacagtattaatttttccaatttgtgaactgcagcctgtaagttttgatatattgtgttttcatttgtttatattgaggtatttctaatttcctttttgatttcattttgacacaatggttgtttaaaagtgtgttctttaatttccatgtatctatagatttttcagtttttcttttgctattgatttctgtgtcattccattgtggtcagaaaaaatacttggtatgatttctaccttcttaagttggttaggactttttttgtaacctagcatgttacctaccttggagaaaaatttgggggcacttaagaaaaatgtgtattctgccactgctgggtgaaatgctccgtatgtatctgttaggtctgtttgatctataatattattcatgtcctctgtttccttacttatcttccgtattgatgtcctcttcattattgaaagtgtggtatcgaagtttcctactattactgtattgctatctatttcttccttcagttctgttaatgtttgctttacatatctaggtgctctgatgttggatgcatatatatttataattcttatatcttcctgatggattgacctttttaatcattgtatatgtccttctttgtctcttgtgatagtttttgacttagagtatgttttgtctaaggatagccacccatgcattcttttggttaccatttgcttagaatacctttttctagcccttcactttcaccctgtatgtctcactaagtctaaagtgagtttcctgtggagtgcatgtagttgggtattttgtttgttttccattcagctactctatgtctttggattgggaattaattcattaaaattcagtgtaataattgggaaggggaggatttaatattgcggtttcattagttgttttcttttagtcctatagtccttttgtcagtcttttcctttcttactgtcctcgtttatgttttcttgattttttttttttgtattcatatgctttaattcttgttgacatttttagtattataccttttcatgggttttggaattttcgtttgctgactcattttgagtgggatgtttttacattcactttttattacattttttccctttctctgggcttactcttgttttccttgaggttttgtgatcacttttatctggtctgaaagacttccagtccagacccaggttttattatgttctatcagccacccttgccaatggtgatattggggatatcacatactctgttatcaagcgagcaggtggtttgattctgtgcctgggtctgaatcacatctttgtcaacttttccctcacaggcttaaatttttataaaactgcttctcttagtgtgtcgtgttttttgttgttgtagttgtagttttgtttttagcttcttcttattagcccaacctccttgtttggctttacagttaacctggcttaggtctccttatctccagtgagccaattttagattctcttatcctgtaggagcagaatgcccagcagtcagtgctggcttctaaatctggagccttgcaggttccctgacttcagacttactcactgcttgtgattctaatgcgtttctagtccacagagatgtttatctggttcttggaaacaaactataaacatttttatgtttactttttatgtttcatctttaattatcacgtttggaataggaggagttttataatggtgtgaatttgctgaatcatgttgaccagaagtctcaccattacttctgaagcattttaaagcatatttctgtcctaatttcttgtccatagctctgtatgattctgacctttgaagactataataaaggttcatcattttttaatgtacttattgtttatactcatcactgagagaaaataagttacattacacagtagtcgagaataaacttctttaatgggtttatgtgactaaaattgtaaaggtcaggggaattaatgggaaatttgttttaattatgcattgatcacaaaacataatattgttttctttaaggaactgaacttgctggattctgaatcatattttattactaaacagaaacaaataaactcagattgatttattgaccctgctgtatgccaggccttgtgaggaatacatgggaaggaaataaaaaggtctctgtcattagaaaggctggtgtttctcagctgaaggctgaggttggagggtctcctcctcccctctccccagtagaaatctgtgagaatctgaaataggaggctttttaattttcaaactatgcaccctatctccatttcccagccccctaccaccaggggagtgtgtctgttgcccctcaactgcttcagaactactatcagagccacttttaccaagaacatacaccatagcaattggacattatgaaaacaataaaatatgtaattaaattctaaaatgaattaggatgctagatggattgagcatacactggatactaggcaatgcattaggaccttccttacaattgctgttacatcaactctgtggacagatgttaacatccatttttagatacacaaaagagggagcgcagagagctcaagcagcttgctgaggttcctagtaagtggcagaggtggacttcaaatcccggcctgcttgcctctgaaacccagatcttaattactgtgttgtaataagagggagaaagacaaggttaaaatatgtcctactgtattgtggtttactgaaggaatttatggagattaaaattcataaattgttatagagttaaaacagatgaaataatgcttctttgacagaccatttagttttttctttcatctttaaacaacgctgcactaaaatttgtctgtaatggcataaaaaaaaccctgatatttgccttttcttctccattccccatgcttgtcaatcgttacagagattatgctcaaatgtgatatcaggaaatacttttagtccccagcttaagcttctcatttctatgtgaaatatggcagacttttgatgctttctctaaggtcccgttctggatattctccctgtgttcaaggcccttttagggagagagccagtctatggccagtcttgccaactctgtaaatgcaatttacattcttaaaattcgctatcaccaggtcaaaactagcccctggtgcattttgggaagcttcagttcaaacacctgaattcattttcaccaatgctacctggttaccttgtaactccagagttttttagagaggttttgtatatgattgcttgagctatagctttttccctttttgtaagctattattgaaataaaaacgtaacttacctatttcacggtgtatggatgtttttaagtggaataagttcatgctgttttaacttaggttcaccaaacaacatttttagaatattttcacctttctaaataatgtgcttttgattgatactccctctaattcaaactggcagtgcatagtaccctaaaccagtgcccgcataagcagtctgtataaaacatgcttatgcttttcagcttcccaagtgaatctttcctagagagaattgttttttttttgaatgtttgaggtcatcttacaataattatgcataatcagtaatggaaacaatttaaagagtttacactatgtgcccggaatatgatcatgataaacaagtcatctcatttatttcttacaacacactttttaagggtaggttcgtattatcattcccactttacagagagagaaacaaaggttagagagattaagtaacttgctcatgtcaaggtggtagtgagaaattattgaaagcacccattatgccatgtgagtaagcaaaaactggcagattaatttttagcatactcaaataaaaggtcatgcattagaaaaaaagcagtcaaaagtagcttctgccccatctttagtgaagcatacagagggatatgattgaaatagtcctcagctctgggtcaaactctctggcttctattttcaggccctgccacttgggcaaacattccttctctgtggaaaagtagaatgttggccacaatctcctaaagtcattctagctttgatagggtgtgattgtaggagcctgcaaaggaatctagaatcattgtaggtttcctaatgtctgtagctctatgcaattaaaaagattgagtaaatcttgggagctgtcaagaaggttcttacagtttatatataacatacaaaaaaatgtataggatatatcatagttttgcttgctacatctccaaaatctagtggaattcaagaaagtttcagaaggaaccaccaaaatggcatgatgagactattataaggggtatagcaatctttagcctgcaaatagagaaaaaagtcttatttagaaatgtctacaaaattatgattgttatgtatttcatacttaagaaagtaattttagttgagataaaatgaagtactgttttacacagtggatgataattttgtggaactttccatctgtagaatcaaaacataaaaaataaatgtgaaaacaggcaaatgtagaaataacagtccatcatggattatcaaaggacactataaagtatggagttctcccctaaaagctggtattgatagggatcttagttattatgccttcctactgtatgtgccagggttccaatggaagttgtcaatacagcatagctccaattcaggaaggcaaattttaagtcataaaaggttctgtttaggatggcagatttccttaatcattaattttattagtagtataatataatgttaaatttttgttttggttccagttgaagagcagcatgatgataggaatttgcactagaaaacaatactaatatcacaggaaaacattaagagtttcttctctctgaatagtggtcataataagcccatccttccttttcatagaggttgatggtgtctttggagatgatctatctcacggcctcctcagggcaggtgtccattgtttacctggcaggtgttccttgcacctctgcttgaacactgcccatatttggcagcttatcctctggggagtactgttcccttgtgggactgctcaggtttattctttactgagctcaaatctatgtgcatatgctctttctcactggcctgattattccttcagggcaagtctactcttcttgcagatgaagcatctagccccttacagtcttctcttctccagtgtaatatattctgctgctcttcaagcagtgcatttctagacactggaaaatcctgtcagttcttttctgaccactgtctcttttccaaactctttcctcaggtgtcctggacggaaacaaaagggagtaaaaaagtgttggatttatttagaataaaaagggagtattacttcacataatcaacagcattattttatttttatcaatgaaccttaaaatctttaaaaacattttcccatgactgagatactgttagctcaatatgcttgtggccaccacctgagtttcctgattgttgccagacagaccgctatcaactcaccctctcaaagtgcagtgtgtgcttcagatttatccccactgaattatcttgtcagttttaagctattatttgtgcttcaggatattttacaatcttgattatttggtccaacatattaatgattcatcttatatttttatcatcttaaaattcataagaatatctccaaggtattgatggaaatgttaaacaagattgtatcaagggccgagttaagttaagcaatgctaacattcaaaacttaatgagaaatataatttagtaagaatggtactttgatgcttgtatttcctttaatcttgctctaatttatagcctattaaaatatactgtttatgctaataaatacaaattaaattttaaaatacatgtttttgtttgtattgttttttcaaaaaatgcacaattgagaaaaaaagtccacttttctttctttttttttaaggttttccacaggttgtgattattcaacacatggctacaatcgactaatgagatttaactgatttaatgtatgataatataatctaatgacaagtcaaaataattagggggacagggacaacctcatgagtgttgactttaaaaatctaaatccacaacatgacaataatgtcacagtgtccattgatgaagaaagtgaacagtctttttttaatgatgttcttttattttagttgattgcatttagagagaggacaactaaactattcattctcctttgtggtatctattaagttttaaaaattaccttgtctttctgttattttttttatttatttattatactttaagttttagggtacatgtgcacaacatgcaggtttgtcacatatgtatacctgtgccatgttggtgtgctgcacccattaactcgtcatttaacattaggtatatctcctaatgctatccctccccactcccccaaccccacaacaggccccggtgtgtgatgttccccttcctgtgtccaagtgttctcattgttcaattcccacctatgagtgagaacatgcggtgtttggtttttttgtccttgtgatagtttgctgagaatgatggtttccagcttcatccatgtccctacaaaggacatgaactcatcattttttatggctgcatagtattccatgatgtatatgtgccacattttcttaatccagtctatcattgttggacatttgggttggttccaagtctttgatattgtgaatagtgccacaataaacatacatctacatgtgtctttatagcagcatgatttataatcttttgggtatatactcagtaatgggatggctgggtcaaatggtatttctggttctagatccctgaggaatcgccacactgtcttccacaatggttgaactagtttacagtcccaccaacagtgtaaaagtgttcctctttctccacatcctctccagaacctgttgtttcctgactttttaatgatcaccattctaactggtgtgagatggtatctcattgtggttttgatttgcatttctctgatggccagtgatgatgagcattttttcatctgtcttttggctgcataaatgtcttcctttgagaagtgtctgttcatatccttctaccacttgtatggccatactgcccaaggtaatttacagattcaatgccatccccatcaagctaccaatgactttcttcacagaattggaaaaaactactttaaagttcatatagaaccaaaaaagagcctgcattgccaagtcaatcctaagccaaaagaacaaagctggaggcatcacgctacctgacttcaaactatactacaaggctacagtaaccaaaacagcatggtactggtaccaaaacagagaaatagaccaatggaacagaacagagccctcagaaacaatgccacatatctacagctatctggtctttgacaaacctgacaaaaacaagacatggggaaaggattccctatttaatgaatggtgctgggaaaactggctagccatgtgcagaaagctgaaactggatcccttccttacaccttatacaaaaattaattcaagatggatgaaagacttaaatgttagacccaaaaccataaaaaccctaggagaaaacctaggcaatactgttcaggacataggcatgggcaaggacttcatgtctaaaacaccaaaagcaatggcaacaaaagccaaaatcgacaaatgggatctaattaaactaaagagcttctgcacagcaaaagaaactaccatcagagtgaacaggcaacctacagaatgggagaaaatttttgcaatctacttatctgacaaagggctaatatccagaatctacaatgaattctgttatgtttttaaaataattattccttatggactttcagtctaagctaatttttatttgttctctccagcaggtctatctttataacattcaagctccccctactccttatccttggagttcacttttatggggacaaaagatgagttttctgtgctttggaaagcatgattatgcttcatgttagctttggaattagaagaaatcattttcggaccattttttttgagttgtgatacacaaacattataaggttaatcagcattttggcttattagtggcccttgattcttaggaaactaagataattctctttttcctgcagatgtgacatttgactatgaatattgaagttaaacttcaattcattgtattgtaaatggaaaagaagagtttttcattttaggtatatatacataatacatatattcttttccttggctctcatcatgtttatattagatacaaaactagttaacatgtctagtctggcatttttcctccaagatatataaattctaataaaaaataagacaagattggggaatggggataatagtattcttttaaacaaggatgcaagaaaatgaaatgtttaatttttgcaacatctcctttctaaaacaaaatatactgatggaaatttggcttgtttcctagagtctcaacacaggagttattaactgcgatgaccgggctaatactatgtgaggtggagtatgataaaaggattaaaagctagaggtactgtgcttggatagcaagctggatgcttgtgcaggcatggagcctttcaaagtaaagttggctccttgacactctgtcctgcagcttgcgctgatttttaagatcattgaaaatcaggtcattgagaagtcttcttttagggatgtctgtaacattctttgactgtcttatgtttaagctagaatttaagcatccaaataaaagttgttctcaggtgtcatcatcataggaagccattcagctaccctaaagttcactaaaaagtcctggaacttgaggtgattgacttctgactccccattgtcagtgtggtccagggacatggcaggcaggagccaactgcttaaggtagaaatgctttgagtaactttcatttaaactgcacagactatcatggctgggtatttttcaaagctacatagggttctggaattttagaaaccattaggggccaagaagaatctgtcagcttatagatctaaatgttcaaaatttaagttaaagcctgtttcttttggtaggaagcaccttgactcccattttttataatgaaagattgatgatatctctattagcctgtttaaactgagccataaaagagtctgtaggaggccaggtacagtggctcatgcctttaatctcagcactttgggaggctgaggcaggcagatcacttgaagtcaggagttccagaccaggccaacatggtgaaaaccggtatctactgagagtacaaaaattagccaggcctggtggcacgtgcctgtaatcccagctactcaggaggatgaggcatgagaatcacttgaacctgggagacagaggttgctgtgagccaagatcacacctctgcactccggcctgggtgactgagtgaaactgtgtctcaaaaaaacaaaaaaaaaaaagtctgtagggtaccaaatgcttttttttttttggagacaggatctggctctgtggtacatactggagtgtagtggtgtgttcatggctcactgtagccacagtcttctggactcaagtatcctcctacctcagtccaccttcccctctccagtagctgggactatagacgtgcaccactacacccggctatttttttttttcaatagagatgagttctcactacattgtacaggctggtcttgaactcctggcctcaattgatcctccctccttgacttcccaaagtgctcagattacatgtgtgagccaccatgctcggccttcttcttttctaaaatcccacccacttagcatgacaaaggcctgggacataatggtaagtgaatagttgtaaggaatgagaagttttagctgtgcactgtaccatgcttggatttgattatgggaaagatgatcaatattaacatagaagttacctaaactctctgtgtcttttcccttacctcaggaagttcaaatacaatgttgtaattcagctcttctactcttcctgtcctctcaaatgagacaacttatactgtggttgctgaggctaaatagaggaggaattcaaatacatggttcttctacttaagatcatctccagttgcatcaaatcatgacttctggatgcaacccagttgcctccatttcatgagaatggtttccttccatagacattctctgctgttcccctatcattgtcaaatcaatgtttaatcaattccagccatttcttgcaaatccactgcaatcacattttataaatctacctagtgcttggttttcatgcgccgcagataaattaggtccttcttgttttatcctgagctatcagtctagtaacatgctcacagcatgcaaccaggaataggcatgatctcctttttgtgagtctaatctgagtgtcctttacaagtaagaggggatagtctgagagtggaaacagctcttttcaggaccagctgggtgatccatgagcatttgaacagatggcccatttttgtgggaaaggattctgtatcctacaagctaacacccaacagcttcactgaaaaaaaaaaaaaaagcttgaagataagaaatcaattcaagaggaacccacatgtttgctgtgttgcctctgaacacaccctgtatgtcaagagcttagctttattctgtagaccacctagtcagaatcattggggaggaaaatatttgttcaaacatagtcccttttgtctgtgctgggcaatagcacaatacattcagcaaccaccctctgaaagccaaggctttgtctccagtggggattatgaaaacatggatttcttgagaagtgcctgcccacctgtgtttagattttaaattttaggaagatgcttgacagccagaaaagaggtgctcagggaaaagtctgttgagattatagagactttttgaaagaccattacctcctttaaaatgattagaatagaagaggaattcttgaaaactggcatggaatatcgtattagatggaaccttggaaggttttatttatcccttctcttttagctttctgtctaaggcctcagattgtagtctattttagaaaatctccaaggcaggaaatttttcataacctttcccctgttagtcattttttttaacttcaacaaaagcctgcatcagaagcttcttgctcgcttatatgaccctaacgctcactgctgcagtccaagcctggcttcctttgcactttcttttgctgttcatattcttcacagtgggacctgtcttagctgaagcccattattaggtcactccttggcctcttctctaaggctaaataatgagttatttttttttctccttttttggtacatcatattttttcaaccatttaatgatttttgttgttgaaaatttggggatttcctgtgtctggaaatgcattaggcctcaaactttgtacccctaagacttttcctgctaccttttaaaagacaccaagtaaaattaagactaggagaagacagctgctgcaatttttaaaaaatcacaaaagcaaaaaaaaaaaaaaaaaaaccaaaaacaccgagtagctgtctttctggtttttgattgagcaagatatttgtaaaatgaagcatactttattgtcagatgggcctgttgtttactgacaattgaccaacatgaatgtggtcaggtttagatgaatatctatacaactcacataatttttaatgaagggagttaaaagctaagcatgccaagaaaataagtatgactcaaaagtggccctttcttagtatattggatgtattatggcttctagttaccaagggcctttgaagatgactgggccattattttaatactttttaatatgcttctggattcaattattgcagatttttacaattatatttgatctctagttagtttataaggaggacactatctttgtcaggttttaatatcaagattgtgatagctttgtaagtaaatgtagatattttctatactttttctttgctttagaacagttgaaatagaacaagatcaatctgacatctaatgtttggttgaactcacttgtaaaactgtctgagccccttgacttccaaaggtaggtttttgataattcttgctatagtttaacatatcacacatatggaagactttatttatctatgttcaatctagagaatagtaatggaaggattacacatgttctcaccactgagttgcagaaacagaacactatcagtgtctttgaaggtcactgtgttcccgtacctgatcacctcctcctctctgccctaacccccatttgacataaacacaatgctaactttggtataccattgctttgcttttcttcatagttataccatctttgtatatattattactgaagattatattatttagtttagttgaaatttatattatagaatcataatcttctacttcttttgtcttttttgggtttttgttttttgttgcctatttttgttttgagattcatttatatttaataatgcatcactaggtcattttcagttcactttactactttgtaatagtccattgtatgactattccacaatgtatcgattctactgatgatggacatttgtgtgttttcagtttgagaacttctgaatgtgtctgtatgaccgttttggtccatgtctcctggtattagaattcctctaatgtttacaccaagagtggaattgttggattgtggaatgcccatatgttcaactttataaggatatgtccaattgttttcccttaattattttaacaattttctgcttctaccaggagtggataagaattcctattgctcagcctccttgccaagatctcatttgtgtgattttaaattttttgccagatagttgtaaagtggtatcttattaaggatttaatttacatttacatttccctgattggtaatgaaattggtcaccttttcaaatgcttgctgtcattcataatttcttttctgtgaaatgcctctttatgtgttttgcctatttgctttttgggttgcttggcttttttattgatttgtaagaattctttacccattttgaatataaatcattttgagttatatatattgtaaatgtcttcttctaatttctagcaactcctctcattctatgatttctcttgatgaacataaagccttcattttatgatagttaaatttatacatctactattcatgctttgaatttttattctatttttaaaatctccacactgaagatataaagatatttttctctgttgcacttaaaactatcattatattgtgtttatttattttccatcttcccaccagaatctaaattcaattaaggctagaatatttgcttgttttactcatttcggtatctctagcacatagtgggaactcaataaaaattgttgaaggaaaccatgactgaatgccagagagggtgaaatgttcttcagtatcttgcattagctcattttcctaagaatgcacatcctctgaggctatttcctctccctagtcctgccatatttttcatatgtctcattttcatctcataatcaggtggatccatttggactcagtgtcttcatatgcaccagtaacagaggggcttgtcctcaggctgctgtctgcacatctttgatttcgtccatctccactctcagacctacagctggcctgcaggtggatgtatgccgttgtcattctggttccttctcctagcaggctttcatccagtgcatttctgttcgactgcggtgtattcttcccctattcccaaggccctcattcccaaggtagtcagggctaatttagtctgcctcgcaaataacaaaccctacatttcaaagaactagagttcccattctgcctttctagttgttttgttacagctgctactgctgttgttgttttcagagtaactttttactctatactgcatttggaaaagatgatggtgaaaaggaagttgggggaaaggaattggtcagtgccttgagtgcctcaggatgcagaacacaaggggtagatgggcaggtgcccacttctctgttgattctaggccatgcttttgctcaaaggaatccagatctggcaacagaggcagtgaagggactgtgcattttcctagcatttatcaggtgatatttttcatgaaactgcagtttactgcatttctgggtagtctgtttttgtttgtttgtctaactcagatccaagtttattataactaatgttcttttatgcctgaccctgacataagggagattttcagtagccttgtgcattggtatatttttctgggttatcttttgtgaggtaacattaaggaatgctagccacattccattttgagtgaaacctcctgcactgctattttctaagtgtatgcagaagctcatatatttggaaaattcaagttcattcaaattgctactgaattagaagtatctttttgtcattacctagttttaaatcaatagatattaaaattactactactatttcattgttgccccagtttttttttctgatttaaaaaaatatactaaaacaagctctcataatccagagaatatgtaatcattcttctatagcactataccaaagaccttatcctatgggatatcgcttagtttcctatcattcaaaaaccatctttccaattttttaactaccagtttaagtaacagtaagtagattacagaatggagaaaacataaagaagtatgatcgtaaacaacttcaatttttctgaaagaaatctgaaggataaaataatagcttccttgacttagttgttcctatatattatctgagaaaaagtttattgaagcacatttttacacttttaatccactggaacgtcactgagaaaatgttctgagagtcataagaatgttgactaattgggctgtttgtcccacatgggattacaccactactttctgaatcagaagttcctgctattgcaacatgaattattctttattttttatttttccctcttagaaacaatccatttgggttcattacatagccatttgttagtttgggggattgtgcttgtttgtaactacaatgaagtcatactagactgggtccgtatgtaagtcagtgggagatcgtgcagctgctcagtgaatcattcagtgcaaagggtcaccctaatattttaaccccaaagtcctgctttcccaaagtcatgggtaatttttattttaatcatcaagaagattggttcaactttggtttacttagtacatgttgcacatacatatcaatctgtaaaacttctaaaaaaattatattgaagtataatattctcagagaaagtgcacgaatcctaagtgtatatggtgaacttttacaaactgagtacacctgtgtaactgctacccagatcagaaaacagaacatgaccagcaccccaaaaggtttcctctaccccctttttgtcacaaaccctcctcaccaagagtaatcactctcctgttttgcgtgtttttatactttatataaatggatttatacatcatgtgttattttgtatctggcttctttcattcttcattatgtttatgagactcatacaattttatcatgaattgtgttttttcattttccatttctatattattgctatggagtgtcctattgataaatacaacacagtttattcattctattgtcagcagacatttcatgagttttctttctttttttttttttagaagggttaggcctattatgaatactctgttatgaacattccagtacatcttttttggttaaagtatacacacacacacacacacacacacacacacacacacacacacacatcctgttggatatataacgaggagtagcattgctgggtcatagttttgtgtatgttcagatttaatagataagccagtttttccaggtggttgaatgtacttacactagcaatgtacaagagttccagttgctctacctcctcaccaatatttggcatattttgtctttttcattttagccatctggttcaatatgtattgaatgtggtttaatttatatttccctaatgataatgaagctgagtatcgtttttatgattattagtaatttgcatatctttctttgtgaattgtctgttcatatacatatatatatatgctgaatattttctgtttttccgtgggttaccttttcactctcttagtggggtcttttgatgactagctttcctagtttaaaaaaaaacactctcacatattaaagatcttagtaaatatttagaaaattgttaaccaatgtgtgaggatctcagtagtgacatgtttaactcaaaatgtaatttattatttttttcttttatggcttataatttttgtgtccagtttaagatatctttgcctactccaaattggtgaagttattctatgccttcctctaaaatctgtgtttagatatgtaattcatctgactacatatttgtatgttttataatgatcaagatacattttttttcaaaccaatattctatataccccagcatcactttacttggtttataacttgtttgaaatgtgtccacaaaatttagtttcagtgaatttttaaatattttcttataattactaatatttcctaagaagaattttaaacctgtgatgatttcaaatgtgtaatataatttctagatttatttaatactaatgtcagttgaaatttcccttaaaagttctcctgttcaattggatctagttttgaaatccagctatttatttattcaacatcaatctataatgcataaaacaattttttaaataaattattgttctcattttctcatttaaatcaattcaacacatgtttattacgtttcttctagaatttgggacagttacgaatgtggttgaagtttcaagcttcatttttatatcctttaggttttaagccatataataaatttatcaaatatctgtcagtaataagccaatttcttttctttttttttttttttttttgagatggagtcttgctctgccaccccggagtgcagtggcgcaatctcagctcactgcaagctccacctcccgagttcacaccattctcctgcctcagcctcccaagtagctgggactacaggcgcctgccaccacacccagctaattttttgtatttttagtagagacagggtttcaccgtgttaaccaggatggtcttgatctcctgacctcgtgatccacccgcctcggcctcccaaagtgctgggattagaggcgtgagccaccgcacccggccaagccaatttctttagtagtcaaaattatattaataaagaaaggtacaaagtgaggatttttattactattaggatagacttagaccccttatacaattcctcaataccaagttttccactaataatgacacatatctttaaagacataaaaataggaaagaaaatataaaagtttcatttttatattttgaatacctataaatgtttactctttgatgtcatttttgcttagttttattttttaactttttattatttgttctaggttgtactggtcagtggacatctggacagctgggatgttgggcagggtgccatggatgatggcggtggagcctttatatcatgggaagcactctcacttattaaagatcttggtaaatatttagaaaattgttaactaatgtgtgaggatctcagtgacatgtttaactcaaaacacaaaatacttaacagattagttactatggtatgttcaaagatcctcttgaggtcagttgattcccagaaaagaaacaacttatgctcttaaagaaatttttattcatgtgtacgccagacatctaaagtgtcaaatgttattatcagccactggggaaaatgaacaagcaaataaaactgaagcaaatgtaaccacaccagctaaagaatatgcaaggaaaatatgatgaaatgcaaagaaaaatcagcagcacctcctacttcctttcccttattcatcttaacacattatcagactattaggacaatggataaaggctggtcgtctttccatcatagaaataaaagagtaacctagatagaaagaatgatttccatagccacaataaggaatccaggcagataattctttgttgcaaggtctgtcccatgcatgataggatgttttgcagcatccctgacctcttcccactagaagccagtagcaccctcccctaacctcaagttatgataacaaaaatgtctccagacattgccagatgtcccctggggggccagggaagcagttgccccattttgagaaccactaatataaactaataaaaatatctaggtaacctgaatacagggtcattttgttaaagaaaacaaactaattggaaatcttacattgtatatacacttttaccataattaccatacatgacagaaaatattttgaccacctactttgctttttataaagcactttgtaaaagctgggcatataggtttaaaggatgtcccctgttcttaagactcttagaatggagtgggtaaccttcacacatacatacacacatagttatcaatatagacataatttcaacatctaattttagaattggggaaggtttgagagagaagttatccagcaaataaaactgaaaatcacacattccttcacagaaaatctgggagacgctatgttaattctctcctcctcttctcttaaaaatattcccttggctatctcttctttctgtttctcatatcattccagaaagaagtgggttctagaggaaagcaggaaaaagtcgaacatttttcctcttcaaaaatcaccgataatgattttggacattaattttatttcagtatgttcaatcagcttgattggaagcacagtggtggagtaaaaagagaaattttctttagacccatttgaattggactttaggtcactttactatattttggtccttaagcaagtcatttgaatgctctggacttcatttttctcatctctattaaactgtaagcttcagagtatttcatttgctctagattggaataaaaattgtatcttctttaagctttgaatcttacttcttcggtattcagcatgggaccctaaatcactgttaattgaattgaattcagttgcatggacaaatgttaaataccatgcaaaagtgaattgagtatcttttaccagttctcaaagtacatcgacttcagttgcttttgatagctagtgaccagtctctttaatttgggacttaaatctccaaaagatttctgaaagtctatgtaaagatatgaatagaactctaaaataaagagtaatatttcttttgagtaggcattatgaggcaccatagtatactgttaaaaacataggattctggagccagactgccagggttcaaatctcagctctgcagtctgctaggtgtgtggccttaggcaagttactttgcctctctgtgcctcaattttctcatctgtgaaatgggataataatagttcctatctcataaagttgctttgaaaattaaataagcagagtatacttagaacatgggctggcccaacccaagttatcaataaatgttaacttttataacttaacttaataagcatgattctgacagtaccatttttttaatataagagaagatgataatttagtttacctccatccccattagtgattgctttgcctcctaacttttagtatattagctatactaatgtaactttagggccagttgctatgtatccctaaaatatcctttccctttactacttaagtcaccatcccttgtatgatagaaacccagtgacccctccactttttttcatttcacactaaatttttagaagtcttaaatttctcctggttacttctatatcctgcttatgtttaatgcccagtatctactctgcacctcactttccatgattgcacccattgagtcttactctttaattttgaaattgtggatttctatttgtagattgcctatgtattttaacatgaagagctaggttcagcatgtgatgtgtatgaattctggatgaaaattgctgatatacttgaactagaaatatgcccttgggcttgaggccaagaaataggttcataattatattacttaattacatggaatccaatctgtttaattggtaaaatgtgaaagctctgtggcaatctctttttccaagaaaaatgagactccttttggatgctattccttggatgatgtgtcatgcagcatgtcagagtccctcagtggagcgtgttaacttgaagagctggtccagtggggatctctgatatttggaaatatttttctaagattcatccttctggtatcttcttctttgtcttcccctctcaccactcttatagattcacttttttgctcaagccttcagcttaaattatattcaattaatctaacagaagagttatttgtgctttgtaaatataatcagtctttcccgagtaactgtctacagaaggctgtttgctgtgaagcgtcgttgaatacttttctgtgtctgtggtttactggacttgaaactgtttatttgaaatgttattttctggaatgttctggtgtcagtggacaaagcctatggccaatgatgctccaaaatgctcatttggcacttagaaaataaactaccatccatcccaaattcttccaactgtatcattttctatgaagttagaattttgagtttccaggtctaaagaaatgaaagatatgagaattaacagtattacctggttgttggaatgtggaatatataagaaacatttttccagaaaaaatgtaaatgttgagcctcctgactgtgattactatagagcttgaaagtctatgtcttagaaaaatattttattggtatgtttcttcattcattcactcaacaaatacttgtgcattgactgctggttcatgtatcagatgccttgcactaaagaggaaagagaaatggccctttaagtccttgaagtaggagagacatttaattcaaaaattgcaatgaaattgtggtaagttctctgaatgtaggatgtacaaattactttgggcacctggtaaagaaacagaccaacatggcttggctgggtcagagcaacttcactaagatgttatttgaactttctttcataaagataaatagaaattcctgagatgaacagtgcagaatgaagtattcccagcagagtacagagcttccagttctgtgtgtcattaaaaatgagaagaaaattgttgacagtagcagtcttgggattatagggggagacaggagttgtggaattacaggagaggttcactttttacctgatatatttgtataatgttagatttttgtgtaataagtatgtgttacttcagtaatcaagaaaaagctatcaaatactcctctacccctactcccaaaaaagaaattaaaaagaaaagaaagagttttggtattgtcattatcataaacaccctgttaacagaaacaacacagcagaggtaaggagttggaagagttgtccaggagtcaccaagcctccctggcccagaatacaaccatgaagacagccaaaggcatgccagggctttgatgcaagttccactgtagctagagccttatgcagccatttccaatgcagtgggttctctcttagaaatggggacccatctgggaagaaggttttcttccctaaggctctggtcaagactgtcttggaaaagccccaggaaatgtaattcagagtaacagagaagaaaatgaacagcctccagtgaaatggaagcctaaagggtagagctagagatggctggtgtcctgaaacgaatctgggactagcccagacctacaaaagatatctcctttggaaaggacctccccactgggtttagccataccgctgggtataataaaaatattgagagctagcattgactgaagattactattgtaagcattgtgctaagcactccactgagtacatattctcctttattcctgaaaataaacccaagcagtaggtaactcgtgttatattcattttacagaagaggaaaccaaagcagagaaaagctaagtaccttgcccaagatcaccagctattatgtgaaaaatttaaatctaggcagcctgacgccatgcccaacactcttttttttttttttttgagacggagtctcgctctgtcgcccaggctggagtgcagtggtgcgatctcggctcactgcaagctccgcctcccgggttcacgccattctcctgcctcagcctcacgagtagctgggactacaggcgcccgctaccacgcccggctaattttttgtatttttagtagagacggggtttcaccgtgttagccaggatggtctctatctcctgacctcgtgatccgcccgcctcggcctcccaaagtgctgggattacaggcgtgagccaccgcgcccggccactcttaagtactttataatattgttttaatggaaaaacactgccagtctgtttctaggaacactcatcctcaggataaaaagagatattataaagaaaggggggaaaagtgtcctatggtcagataagtttgggaactccctcttggtaatttctttatttgtaaataacatttgttgggagagtattcactccgtgggtatagcgtactttggaacacaatgccctgcggcattttttgaggtggcagaactgagtaaggatacaagaatccttacacagatgcacttctggaagtgagtacaaatagccttggatttgttttcattctagattttctaggctacctttgggagcctgagattgccagaatattgacaagctagaaccatatgatgattccttaattggcatgatagagcctattgttgtgtctctccctgaagaacatttgtatccacccaagtgcaaactctagctgacaactaactttttatccacactatctgagtctattttttcaaaatgaacgtagtattattggaaatatttgaaatatgctaatgactctatcaggtttttcatggccccagatgaatcagaatttgtaagatttttattttctagaaggaatttttattttaaaacattccatgaactctccctattgccatgttggatacgctttctgcacaattatttgggaacaaaggaagggagactaatggccctgggaaaggtatcctattaaaatcactggtcctcaatatgtttagtgaataatacatctgcttgtgaagctgtccagtctgaagctgtgttttaagtcttaaatatttcccccaacattaaattttatttttattaatttaaatgttaatgcgtagatgctgcttgcttctttggttctgaattttggtcttgatgttttataattgcacttatcgatgaaagtacctaaaccagtagaagaattagaaacttgaagaaattgtgaagaaggattaaaatggcagataggaggcaggactagtttgcagctcccattcgaacagacagagcagtgtttggagactcacatagtgaacttttgctctaagaactacctcaagaacatatcaggaaagccaagagaatccacagaccctttgaaggaactggatcaccactgcaggcttcctgagatgccaaaaaaaactatgagtctgtttgctttctcaaaggagaggctcttggtctggggcaagttctcagccctagttacctgttgcctggaaatagattcagtgctgttatgggggcactgtgggagtgagaccggccttcaggattgcaggctgcatgggagcagggtaaggcctgtgactgccagctttcctccacctccctggcaacttgtatgactcagtagagacagccataatccccctgggaatataactccattggactgggatccacaccctcatagcccacagcagctgcagcaagccctgccaaaggagaggctgaactcagacatgcttaccccttcccccacctggtagtctttctctacctgccctggtagccaaagacaaaggtcataatcttttgggagctctatggccctacctatcacctgagaaaccacttaaccaagtgttcctagggcaactaggaacacagctgatacactcttgtcagtgccacctcctggctggaggccaaccaacacaaaaccaacactctaaacaaaaacacaaccaaggaccctcgcagagacgacttcactcccctgctaattccatcagagcaggtgctggcatccatggctgcaagacctgaagacagatcacatcacaggactctttgcagacactctccagtaccagcctgaagcccagtagctcctctgggtggctagacccagaagagcaaaaacaatcactacagttcagctctcaggaagccccattcctaggggaagggaaagaacatcacatcaagggagcatcccgtgggacaaaagaatctgattagcagccctgaatcccagaccttccctctgacctagtctacccaaatgagaaggaaccagaaaaacatctgggtaatatgagaaaacaagtttcttttacatcccccaaaagatgataccagttcaccagcaatggatccaaaccaagatgaaatctccaaattgccagaaatagaattcagaaagttgattattaagttaatcaaggaggcaccagagaaaggtgaagtccaactaaaagaaataaaaattatgggatatgaaacaaaaagtcttcagtgaaatagacagcataaatgtaaaacaatcacaacttctagaaggcaagaaatgcaaaatgcactggaaagtctcagcaatggaatggaacaagcagaagaaagaaattcagagttcaaagacaaggctttcaaattaacctaatctgtcaaagacaaagaaaaaagaatgaaaaaattgaacaaagcctccaagaagtttgggattatgttaaacatccaaacctaaaaataatcggcgttctcaaggaagaagagaaatctaaaagtctgaaaaacatatttgttagaatcatcaaggaaaacttccctggccttcctagagatctagacatccaaatacaagaaactcaaagaactcctgggaaattcattgccaaaagatcatcacctaggcacatagtcatcaggttaactaaagtcaagataaaggaaggaatcttaagagctctgaggcaaaagcatcaggtaacctataaagggaaaaccccatcagattaacagcagatttctcagcagaaaccctaccagctagatgggattggggtcctctttttagcctccttaaacaaaacaattatcagccaagaattttgtatccagcaaaactaagcttcataaatgaaggaaagatagtcttttccagacaaacaaatgctgagagaattcaccactaccgagccagtactacaaaaactgctaaaaggagctctaaatcttgaaacaaatccttgaaatataccaaaatagaatctccttaaagcataaatctcacagaaactacagaacaataacacagtggaaaaaaaggtaatcaggcaacaaatagcatgatgaataaaatagtacctcacatgtcaatactaacattgattgtaaatggcctaaattctccacttaaaagataacagaatgacagaatggataagaatgcaccaaccaagtttctgctgtcttcaggagactactctcacacataaggactcacgtaaacttaagatgaaggggtggaaaaagatactccatgcaaatggacaccaaaagcgagcaggtgtagctattcttataccagaaaaaacaaactttaaatcaacagcagtttaaaaagatgaagagagacattatataatgataaaaggactagtccaacaggaaaatatcacaattctaaatatatatgcacctaacactggagatcccaaatttatgaaacaattactattagacctaagtagtgagatagacagcaacacaataatatgggggactttaatacaccactgatagcactaaacaggtcatcaagacagaaagtcaacaaagaaaaactctacctaaatgataccctacaagtgaacttaacagatatttacatgacattctacccagcaactgcagaatatacattctattcatcagcacatggaacattctcctagaccatatgataggccacaaaacaagtctcagtaaatttaagaaaatcaaaattatatctagtactttctcagaccacagtggaataaaattcgaaatcaactccaagaggaacccttaaaaccatgtaaatacatggaaattaaataatctgttcttgaatgatcattgggtcaacaatgaaatcaagatggaaatttaaaaattttttgaactgaataataatagtgacgcagcctatcaaaacctctgggatacagcaaaactggtgctaagaggaaagttcatagcattaaatgcctaaaccaaaaatctgaaagagaaccaatagacaacctaaggtcatgcctcatggagctggagaaacaagaacaatcgaaacccaaacccagcagaagaaaatgacgaagatcagagcagaactaaatgaaatttaaaaagaaaaaagataaatgaaacaaaagctggttctttgaaaagataaatgaaacagatagaccaacgagattaaccaagaaaagaagagagaagatacaaatatgctcaattagaaatgaaatgggagatattacaactggtaccacagaaatacaaaagattattcaaggatactgtgaacacctttacacacataaactagaaaatctagaggagatggatatattgaaagtatacaatcctcctagattaaaccaagaagatacagaatctctgaacaggcagtgagattgaaatggtaattaaaaaaaattccaaacaaaaaaattccaggaccagatagattcatggctgaattctatcagatgttcaaaaaagaactggtaccaattctactatttcaaaggataaggaaatagagaatcatccctaactcattctatgaagccagtatcaccctaataccaaaaccaagggaggacataacaaaaaaaaaagagagagagagagaaaactacagaccaatatccctgatgaacgtagatgctaaaatcctcaacaaaatactagcaaactgaatccaacagcatatcaaaaagatacttcaccatgatcaagtgggtttcatactagggatgcagggttgatttaagagacataagtcaataaatatgatacatcacataaacagaattaaaaacaaaaatcacatgatcatcttaatagatgcagaagaagcatttgacaaaatccagcatcgctttatgattaaaaccctgagcaaaattggcatagaagggacataccttgaggtaataatagccatctacaacaaacagataacattatactgaatagggaaagttgaaagcattccccctgagaactggaacaagacaaggattcccattttcaccacttctattcaacatagaattggaagtcctagctagagtcatcagacaagaaaaagatatcaagtgcatcccaatcagtaaagaggaagtcaaactgtcactgtttgctgatgatatgattgtatatgtagaaaaccctaaagactcatccaaaaagctcctaaaactagcaaatgaattcagcaaaggttcaggatacaaaattaatgtacacaaatcactagctcttctatataccaacagcaaccaagctgagaatcaaattaagaactcaacccctttcacaatagctgacaaaaaaaaaaaaaaaaaaaaaaaaaccttaggattatacctaaccaaggacgtgaaagacctctacgagtaaaactaaaaagctctgctgaaagaaatcatagatgacacaagcaaatggaaacacatcccatgctcatggatgggtagcatcaatattatgaaaatgaccatactgccaaaagcaatctacaaattcattgcaattcccatcaaaataccaccatcattcttcaagaagtagaaaaaacatcctaaaattaatatggaaccaaaaaagagcccgcatagccaaagcaagaccaagcaaaaagaacaaatctggaagcatcacattaccctacttcaaactaaactataaggccttagacaccaaaacagcatggtactggtataaaaataggcatatagaccaatggaagagaagaaagaacccagaaataaagccaaatacttacagccaactgatctttgacaaagcaaacaaaaacataaagtggagaaaagacgcctattcaataaatggtgctgggataattggcaagccacatgtaggagaatgaaactggatcctcatctcttaccttacataaaaattaactcaagatggaacaaaaacttaaatctaagacctgaaaccacacagattctagaagataaaattggaaaaagtcttctagacattggcttaggcaaagacttcatgaccaggaacccaaaagcaaatgcaacaaaaacaaagatagacatatgggactcaattaaactaaaaagcttctgcacaacaaaagaaatcatcagcagagttaacagataaccacagagtgggagaaaatctttacaatctatacatcttacaaaggactaatatccagaatctaagaactcaaataagcaagagaataacaaataatcccatcaaaaaagggctaaggacatgaatagacaattctcaaaagaagatatacaaatggccaacaagcgtatggaagaatgctcaacatcactaataatgagggaaatgcaaatcaaaaacacaatgcaataccacctcacacctgcaagaatatccgtaatcaaaaaaaaaaaaaaatagatgttggcagggatgcagtaaaaagggaacacttttacactgatggtgggaatgtaaactggtacaagcactgcggaaaacagtgtggataatctttaaagaactgaaagcagatctacatttaatccagccatctcactactaggtatctacccagaggaaaagaagtcagtatatgaaaaagatgcttgcccactcatgtttatagcagcatgatttgcaattgcaaaaccatggaagcagcccaaatgaccatcaatcaatgatgggtatatatatatcatggaatattactcagccacaaaaaggaacaaaataatggcattcacagcaacctggatgtaattgcagaccatcattctaaatgaattaactcaggaatggaaaatcaaacatcgtatgttctcatccacatgtgggagctaagctatgaggatgcaaatgcataagaatgatacattggactttggggactcaagggaaaggatgggggacagcaaaggataaaagactgcacattgggtgcagtgtatacttctcagttgatgagtgcaccagaatctcagaaattaccactaaataacttactcatgtaaccaaacaccacctgttccccaaaaacctattgaaataaaaaaaaattttttaaaagaatttgttcctttcctttttttaattacatgtaaaactaggtttatggccatggggcatctgtgactcctcctctttttctttagagatgatcttctcattttttattctgatatgttatttcctctagcggcaacttatgttagtgaatggcttttctgtaagacccatggcagatacatatttttttttctgctgggaattgctgagagcttttcctaaggtttgaacacatttagaagcttcactaacacactcaacaaccttatgtctcatcagtttacatagacatttctactaggatgtgtaaaaagacaaattgtgtgtaaattgatttgcaaaatacatctgtgagataaagcaagatttgtttacaatgagtcacttagaatgtggtctaccttttagtctggatttggtatgagagattccatagtcattttagagccttaggctacatgaatattgctgttgttattgtatcatttagttagaatatacaatttctgtgcaaaagtagacaccacccagggtatacagcataataatgaccagttcttttctatctgacagtctggaagggtggcagatgaatgctatgagagggcccccttttctacagcatgcttagcttcctccccgatgtatgctttgatttggccttagaaagtgaaggcatgtggttgtaaaggaagcggaagcttaagaaattggtatcatttatcctggagaataagggccatagaaaatcttactaatggtatccttagtgccccagtggatttcctcccacccaagaatggaatacatacaaatccatggtagggctgtctggaaaacctaggctaccttattgcaatggtatcatcactgtatcacacacttggctcacaaggagacgtcttatttcaataagaagctttgactgcccacttcatgtcaggcaaataatatggacaggacacagttccttgcgtcaaggagctcatagtcaggcaacaatggcttcacatggatagaggcatttaaaccaggccttgaaaagttaggaagtggtaaaaaaaaaaaagaacaaattagaactcatgaaagtacatagtttgaggagtagaagatgtcttcataaatctagagtaatgggtgagtgaggagggggtgggaaacgagtaaagtgaaggatgagagtttgtgaagggtactggatgcaaagctaaaggttggagttggtgctataggcagcaggcaccactgaggattttaagcatgataggacttctttctaaaatagggatatcacattgactattttaactgctaaagtactatgataaatagaatagagatacagaaaaacagagtagggagatcccagttatactgagcctagagaactacagctttggagttgcttagcaaattttatttgctgtggtggatgagccagcttctacttctctatgttaaatataccaaagaggaagtgatggggtttccagggatgctgtgttcttcgcctacacgcttctctgcatcatgctaatgctgcattttgcaaaagctgtggtttacccagcttccaatgaattttgttccagtaaacttgcctaaaaacagaagtctgcaaaaaataagaaaatatgctatgaacatctgatcggacctttatggttaactgggtttttttaattgccgtggaacgtaagggtttagttagtctattcttaggctcctcgactcctgcaaacattctcaaaaataagcactaggaaaagaacgtttctactgggtatgtgacaggataaagaaagtattgagggaagttgattattataagagtacttatttataatcctgctcgtgccctcctcatattagataatcattatcgatgagctgatgcttggcccatgtgcttgcctgacactagcattttcagactacatgtgacccagatctcactgatttttcaacctttaagtcctcctttcttaatccttaaataattcaaaatctctaggtaagtgagaggcagcatggatagtagaataagcatgtgctctatgttagaacatcttggattccaatccttctgtgctatctagtagttgtattttcctggacaaattatttaacattctatcattatatatagattttgaaacagagtctcgctctgttgcccaggctggagtgcagtggcacaatcttggctcactgcaacctccgcctcctgggttcaagtgattcttgtacctcagcctccagagtagctgggatttcaggcacacaccactatgcccaactaatttttgtatttttggtagagacggggtttcaccctgttggccaggctggtctcaaactcctggtctcaagtgatctgcccacctcggcctcccaaagtgctgggattacaggcattagccaccgtgcccagcctaaattatttaacattttaaatctcagttttctctttttacaatgggaacaatttatcttcagttcttgataggataatttgaaataatatacacagtaactggcccctgctaagccatcaataatagtaactattattatcagattctaattgccaaaacagcaggttggatgttccaggagaggttataatcccagtatcaactctcagctctcgagtcttcatgtctgtatcccattgcaaagttcagcttggtcaggggaatcctcacagtgaggaggccctcataataaagcccacatgtgagtttggcctggataagttaactcacaaaccttcaccccagtgtagccaccatccatgagtatacatgaggctagtgtataaggctaattctctcctcactgttgtagtgaagagcacttaatagatgtgtcataaatgttatgcagacttaacactctgaggacatggggatgcacagatcatttttcccatcccttttgctctctctgtgatgtccttaacctaaataacagtgtgtagagaaaaatttataatattcctgaggaaaagaatagtagaaacagtaaatagctgttaaggtcaatataatttactacaaaataagttgtttgagatacagaaaaaaatcaaggcagagaaaacacaaccaaatctagtgcttactatttacaatttaccctggggcctgaattttcaagaaatctttctgttttttaatatagtcacaacaccacaatttttaagcattttcagaagatcctcatgcataaaaaaccaaggatggtgaccactgatgcttgtattattttcctttctctgaaataatggcatcttttaaaaggaatatatttaaaatgtaattgaaattattgagttgttgctctgattaatgtatgtgggaaaatagaagtcaggaaatgtttcaaaagctatatttctgttctcatcgccaatcaccatagaccctagatccatttagccatcccatattcacttgttttaggcaggatgttagaataaagaaatattttatgaagtgcttcatactggaatttactccttttctgaaagagggaagtgtgaatttatcttttatagtgaaataattttacctgaagtcatttcaatgtcatttttggtcataaatgaagagtttggtagaggaatctttgaactaattacctttctgaaaccttacagtattttgttgcaaaaaacaatggttaaacttataaagcagaggtttttggtaaagatgcaaaacatctacctaagaaagccccatgtcctatattttcatttttataatctataaacattaattgaacacctgggagaatggaggagagaaccaatatttacctcctatgtgacagttacttaccatgatctttttaaatcctcaaagccgccctgtaaggcatgtattattaccactggcaggtcattgggcctgtctgggactcagttccttatcagtaaactagatggtaacatgcttgcaggactgttatatggatcaaacataatctaggaaaaacacatgtctattagagttgcaaagatggaaaatacatggcacatgatgttaaagaaaactgtagtggcagtgctgctactaatggtgatcatctcatggcttgaattgaaacagagcactttggtggagcagtgatgtgggatatagagtgacaaggcaatgttcatagtggttgtgataaggaagaacttcaataatgtcctacagcgttttataacagaagcatcattttactaatcacaaatatataacatttcccgatttttttaaataaaagaattggcagtgaatactcttgctttaggacttaaatgaagtagagtcaaataagatttctcatccaggtcttttattttttttctttgatatggagtcttgtctcccaggctacagtgcaatggcacatcagctcactgctgcctcaaattccctggctcaaatgatcctcccacctcggcctcctgagtagctgggactacaggcatgcaccaccatacccggctaattattaaaattcttttttatagagacagggtctcactgtgttgcccaggctggcctcaaactcctggactcaagcaaccttcctgccttgacctcccaaagtgctgggattacaggtgtgagctactgtacctggcctcatcccagtcttcttaaattgatgtgaagatggtagtagattatttcagattttaggatgaactaataatagcagttagcatgcttgaacagactgtatctagttctgagctaaatgctggatatgtgattctcattgagtccaggaggtaggaaccactattactcctttgacagatgaagggactaagactgataatctcacaacttgcaaaactagaaaatctcatatttcttttttgtaaggttgttttttattctttgcccttttttaaactaagaaatatttcaaatattgaaaaataacattgaatatcctccacctagatttcataaatgttaacgaatctggatatttgtttcagatccttagttcagaagaaattaaaagttaccaatacagttgaaacctgttttctacctctccacaatccatttccttctccctctgcagatgtaaccagtgttctgagattgttttaaactcactctagaatatgtatataaaaaatggtatcatatagtttttgtgattttgaatttacataactggtattttcttccatattcaggtttatccttttgtttatttcttctatctttttgaggtaaatatttagtctattaattttcagtctttcttattttctaatgtatacacttaaggccatgcattaccctctaagtactagtttagctgcattttgcaagtttgaaatagtgccttaaagtttccaaaatagagagttattactgcgttactgagctccaattttgttgcatatgagttgtagtgtggtctatagaataccaactttttgttatttattgagagttaactttggctcattactggtcaatatttttttaaatgattatattgacttgaaaagaagatatagcctccctttgctgggaatagagttctacatagttcattagagcaaacttactaactattcaaaagtactgtgtcatttgaaagaagtatattaaaaggccccattaggattgtgattttataaatttctcctttaatttctatcagcttagctctatgtagtttggggttttattgctttatacagtttagccaaaagaccttctttatccttaatgatgaattttctctgcaagtctattttatcaaatattaatatcatagaaccaattcttttttggttacttttttttttttttactattccttttctgacttacctcggttgttgtgttttagttgattctggtatattttaaaatatccaatctgacaatagcagttaacagggaagtttgtcatgtttattgtgattacttacattttgtgattttctaacattttctattaaagttgctattttgctcctttttttctccttgtttgctttctattggattcagtggtttttcttaccctctctcctcattttctctccactatttagaaacttatacattccctttcttttttttagtggttactattaaatatcacatgtatatttgtcttaattaaataatatagtaaccacagattgcttcaatatatccccttccatcatatatattattgttgattagtgttttagttatgccttgtttataaactgtccccagatttgttataacatggtcattattatctgctgtggtctgaatgtgtctcccaagtttcctatgttggaaatgttggaaatcctcaatgcaacagtgtggggaggtgaagtctctgggagctgtttaggtcatgagggatctgcccacatgaatggattgatgccattataaaagggctggaaggagggagttcaccccatttttcccttctgtcttctatgtgaggacagtttctcccctctggaagatgaattgttcaatgtgccattttggaagcagagactggatcttaacctacagtgccttgatcttgaacttgtcaggctttagaactgtgagaaaataaattcctgttctttataaattactcagtctcaggaattatgttgtggtagcacaaaatggactaagacattatttgtttggctttgccacttactggctgtattactttgcaagttttttagatgtgtgatgcctagtttcctcatggatatactggggatcataatagtatctaattataggtttattgtgataattagatgagcttcatcagttcctggcacataactgctcagtgaatttcagctgttatgatttagttagtacttattagattgtcaacatgttcactgatatgtttatgaactattatttctttctcctggttcagttaccttcttcctgaagtaggactcatagtagttcctttaatagagttctgtgagtaataaactatcagttttatttgaaaacacgtttactttgttccatctttgaatgatgttagttgaatgtgaaattgtagatagcagttatttttttcccagaatttggaagatattattttattttttctggctcttatagttgttcttgaggaatctagttgtatcagtgatgatctgcattttcaccatgatttgtttagggacactttaaaaaaatatttccttgctcttacttttttttcttcttcaatctgagaactgggagctcttatgtttttttttttaattcagtaatgtcataagctattattgcctcaaatattgccttcctgcattctattctgtccttctgtaatccatacagaataaatctatcattttgtctcccatgtctctcaatctcactctcaggttttccatctcttcaacttgctttacaactttctgtgtgattttctcaggattcatcctttcaatttatttctctttggttgtgtttttaattctatttaatccttccatttagttttttagcctgatgcttggcatctggagaagacaagaacaggaaaatcaggacaatgacctgactgtgtcacccattggcatgaaataatgaggaaggggtgaggagaactatgaaaagcatgaatggcatgttcagtgatcctcaatcagtttaccaacaagttttcttggtattttaaccttttgtgtgtgttttcaaaggcgttgtaaaaaacaaaacaacatataaatttgttaaataataataatgtatctccagattttgcttatcacaaaaatttataacaaccatactttaatttaaatgaccagtgttactgtatcaaattggtattctttcaactaagagaaaagaaattaaatttgccaatttagtttatttggggtaccatctcacccataaagatataatttttctatgttttttagaatacttgaaactggttcatagagtccctttcgtgatcataggtttgtaaacactggcataacattactgattggagctctagaaagcgggaagtcattcttgcctaccatcttttattcagcatttagctactggctgatctagaaactgcatctacagccactgctcattaccttcttgacccaagttgcagcatctacagaagatggagatgcagtttgtaagtggtccaggaatgagtgttggttagcttttagaggatgttgcttggactagcacaaggagtatcatacaaaactctcttgttgccacccttgacaaatgaccctaattttcatatcggattagaaaattcgattggaccatcaaagcaaatgtgttcttttatggtttattagtgattcttcccagctttggtaagtgcaatttatataatcagctctcaaagattttcactatgggtttttatttattcttgcagaatagtgccttagaaaattttatacggatttttttttgcaactattaagcagttttcccttattcccactctctcaaaccccaatgcccagcatgaagaagaaacaaatctctattttcaaatctaagccactcatgacacacccagctgggcttactctgaaattggatttccattgaaggacagtgggcagaacactaatcacttgggggcctggggaaacagtgggagggtgaatcaggaagccatcaggagatgcagccctcttgctgctttatgtagttagagagagagcatatttttagaatggactttgctaggaggataaataatacagttctattatttggacgtttgaatcacacacgtctagccctttaactcatctgatatacccctatgtactattatttttccatagggagaaaaaggcattaagtgagggataggtatattaatgaatatacttagagttactatattgaaatctggggaatatagatacagagaccaaaatggggagtggtgttgatcattgttggctagtggccctgaatggagcagggagtaggttcctgaatgggcacaggtaggaatcatgtgggaaatgggcacgtgtgcatctttcaaatccctccatagggctgctgcctactgcttgtattaaaaggcattttatgttgcatctacttgaagatgcctaaatatgctatactttcacctctcctcattcaacatatgtccatatgttatgtatacttccattgtcagatttgagctcttgaagcatgatttttaatctgtgcatgcccacatccagtgcaaagtaaaaaccaatagtgtctttcaggtttagaactgaccacagtcaagtactttaggacaggaaagtgagagggccagagggaagcttcgctttggggagtaaaagaaccaatctacagaggcccttggtctcccacagaaacacagaaatgataaggaagtataactatgactaaagagaaaggaaagaagagagagagaaagtgaagaaacacagccaagtagaagcagagcctgctcagggaagcatagatgggttagaggagggacatttgggatgcacatcagaaaatcagatgagaagtccgcgtttgtctgttttgtctggtcaccataattgtgctggctctgagtttcaacctttgttaatcatacagccttgtttaaatatggaatcatttttcttttgtccttccttgactccatcttaaacatcacattactgataactcagagaacttttaacctaggcaatcttcatgtgagttccattcagttccttttgatatacacatatttaaagtgacagttatttcctcttatggaagatagattttatttaataattttttcaagcggagagattagttgtggtcacagtagaaaatttttcataattctccaagtactataaaaagtaacttgatggcataaagtgaattcccatgatgagagtcatcctgtcactgtgaattgctgtgatcatctttaaagtgatatatctttccacactgtctgtcagcaactatgtagggtttgttttagattcaaaaatgtgtgagattagttgatctatatccaaagaattcagacactttttgttgtttttggatctagtcactgttcactagttcagttgtggggtagttttcttatgtttatctgtcctgaagttttatattcagaggcagtttttacatgctctttttttcttacccttcacttaatgaagcagggttataggagaaaaataaccttttatctttcctcagtgatattaacttcattgcatttaactttttaataaatcgtatgcctactaatttacagaagccttatttctaaaaaatgtaatatatatgacttaagactgatcaacatcttcccctttctactacatacatattcggagtttttattttgttttctttctgtatatttcagactgggaaaaaatgtactatttgtaagcagatgatttaatttcagtaaatgtttttttatttctctctccctttgatttattgcttggaaaccatgagaaacatccaagtgcagatgctgttttcccactctgacaaaacattgcttgttgacctcgcaaacttagaaagatttatctcctgtgattcaatggtggaagtaataatattagcagttaaaattttctaagacacgatcaggaaaaggagacttcggtcgttctgcttcttgttaagaacagctggcaatttaaaaagcagagacttgctaagggggaaggaggtaaagaagatcaaacagaaatgcctccccctttagtgaagtatgaactgagggtgctgcatagtagcaataaaatcagattcttaaatgctttcccttgtttagtgtgtatatgtgcttatttttatttagtcttcaaagatgactttccttatatatttattctcttcgcaggaaatacatcttgaccaaatattttttgccaaatacttgttgtatattaaagccagcttaaaatgtcatatttgctgtggctatgttgagactctgacaagattatctgcagtgtgagtgatgtctgcaagagtggcctctcaccatgccttctgcacattgattccactaatctgccaggaggcagaggtgattcctatcattctgagagcttcctatagaaggcagggcctctgcagtctctagaactgaggaactaaatgaaggccaccaaagtgaccattaagttccttaattgtgaggaagcatctttaagaggaaatgattctacagccagaaatatgcgtgaccagttctacaggatgtgatgtcatgtgactggtggagcttgtctttctatcaaaggcttgtacagaaaagggaaaagaaatgggcatgtttcaggtcagttctgaataatggaagaaagaatgaaaggaaggagaggggaggggaggggacaggagcggagggaaggggaggggaggggaggggacaggagcagagcggaggggaggggaggagaggggagtggaggagaggagaggagaggagcggagaggagaggagagaggagaggggcatgtgagctggatttcttcaaaccccaccaacctggacagtgagtcctggaatcaaaataatggtgagcctcagcatctaacatcaaacacccagacttccttctggtttaagaaattccaaaggctctcagctgtgataaaattaaaaggacatattcctatttgttctttttgttattggttctctgtctccccctgaacctttagccagaaatagagatgcaccctttcttcttcagtagctttgaggatcaaagaatcttagttgccagagctgggaggggaatctcaaagattgcctagtggaacaatatgattgttcatgtgaataaactgaaactcagagagaatgtggtctatgcaagacatggcccatagtctgtgtcaaaagccaggttttctgacttgtggcccagggctctctgtagtattctgggccagcaaaatcccgtgtctctccagacacatcttctcttgcaccaaatgggcctccttgctgtgtcctcctcaaaccaccctcactcccacctctgaacctttgctgatgttcacaccctgcacagagtgcccttctcctccaactcctctgctcagcacatcacatcccctaatgctcagcccgatctcatttccaaagttaaggctctgctactcttccagcccaaattgatgtctcctctccctagaccccttcaggtcttttttcattccctgtttcatgtttgattttaacttctcaaccagatgatactttcccaagcctatgtttttgtcttttccacagcagtcctcccagcacctactgccaggccaagtgcttttctctacttcagtcttcttctctgttaaatgtgaataataacacctgctctaaatctaagcctagtggactcccagcttgttgaagggcatgttgaatagtcttatgtactggaagtttgagcttttgggagggtaaaagaagggacagggatgcctaggcacacagaactcaaatgcagttatttgggttttcctctaacttagcctccactggtcaaatgtttttagcacctgcaccagcagccatttccatgtatcccttctccctggagacagtacaaacaagagataattcctatcattgttgggacagaagtctctcaaagcccttaccaatattatagttttgagattcacagtttcctctgaaacttcccctttaggagggatggaaaccacaggatgggcattctggtaaatgctcaacatagatacctatggactgggtagcaggtgacccctaggaaaacctcaaatatcctataaggtcctaataagggccagttattctaagcaaaggagcttctgtgagtcatagtgcaatccatagatatgcttgttagctccttatttaaacccttcctgaaacaacagccaagaaaggaaaggactcaaggtcacctctggaatcagaatctactcagtcttttcccatcctagtttgtattcaccatattcagccctcagccaacttgaggcagagtgccttggtagaaagtggttcttagagacaggcatccaggcaatgtagcaaagtagaaagagccctagactagaagtataaagacccaggtttgaggcctgactctgccacctgctgtctcaaaaactgcaataatataaagtctcttaccaattctagcttcagtcttctcctttgttaaatgtgaataacaataatgccttccctgccagtcatggtggctcacacctctaatcccccctactttgggagaccgaggtgggccaatcactcgaggccaggagttcaagactagtgtggccaacatggcaaaaccccatcctactaaacatacacaaattagctgggcgtggtggcaggtgcctcttgtcctggctactctagaggctgaggcacaagaatcacttgaacctgggaggcagagcttgcagtgagccaaaattgcaccactgcactccagcctgggagacagaacaagagtctgtcataataataataataataataataataataataataataataataataatgctttccctacatctagctataattatttctttaacatttccttccctgctacattgtcagctgcataagagcagggtctatgtgtatcttgtttaacactgtatccccagaaccctagtaggacatgtactgtattaactggttggttgactgagcaatagggagaagtttagagcaagtgcaagctattattatgatccttattatgtttgatgttgttgttatgtctccctagagtttggtggattttggtttggatttccattccactctccatcattgagaaggaactgagtcaaaagacccatagtggatcagcagagaccaaccactcaccatggtcataagtaatttcagagcccatagtatctctctgtagattcttccctagtctcagtacttggccacagagtggatggctttgatcttacacagattgattctatatcccttgatgggtgtgtggcagcaatcatcaacagcaaggtgaccttctctgcttatcatgactggccccttttcttctataattttcttctttggtttttgatgtatgagtatttttagtgacaaagataattaggtactttagtgacaaagataattccaatggtactgtactaaatgtggcttctgcctgaggatgcacttgtgtctgaggaggatctagactgtccaagtgagctcttattttaaagcccctcttacaggttggctcttaaggactgaggagaaagcagggcctttagcatcagacaggtctacttttggaagcccatgtagttgacaatctagctacatgggacaatgtagctacagggaaggaaatgttaaagaaataattatatgtgtgaagaatacctagatgtagggcagatattattattatcatttaacatgaggaaaacttagtctgagagaagcaagaagctttgctccaagtttttgagacagtgacacagataaggtgtctctccttattgtataatagggacaataataaagccatcttcaagggatgttgtgatgaatcagtcagaaaatgtatgtgaagttaatgagcaaagagtctggccatagtattaattagtattaatactattaataagtattcaataaaggagagtctcccactttctttccttccactctgttttccataaattaaccagagataaaagtggtggaattagacttcagtcctgtaatggtgcacctgaagtgcttcctctcaattcatatccatcttccagattgcttgttgtacccatattttctgttaacacaaattggagggagtatcatgactttcatttgttgacagatacacaaatgggcagaacacaatgatgaatgtctcaattcagacaggaattgaatgttgcctgtggggtaggctggctctgccacctgcactgacaatacatcatccctggaaattaacccatcttcaccatagccattgaaatggaaagaagtgcttgttcattaaaaacaccttcaaatggaaaggatgaaggtctagcgtagtatatatggtgcattaatatctataatcatgtttaatttgcattagtctaactctgccacttggaaactgtttttaagatattgtgttgcctgaatgggtttgtgtatgcattatttgcttcttgaataagagctgaacagaagctaatagctttatataaaatatagtgattaccaaattcaagagtcaatgtcctgtttcacattcattcttgctcacttttagtacaagcttatgcatcatcaggcatgttgtatacaaaaataatgatgtgggtcctggtctttataggtctaatgggtggtagttccatatttctgtaaattttaaaagcattattactcactaaatatggatcattttaaaataattagatatatgtatgaataggcttcatatcacaaagttttattttctttgttaaggatatgaatcctaatgtctttactattgaatctgctaattcaaataatatctatcagtaggtagatgagctaaacactaagcctgtatgtcaaattttatacacgatattatgcttagatgcatacatagcaaaaccaatatttacaatatattggtgtacaaacaatatattggtgtaaaaaaatgattagtgcttcatcaagttaatacattcaggtatcataattatgtattatttcatagtgtatcaacaaggagaagagaaactagttatttcaagcaggaagtgatttaatttagggaaatagattctataacagaaagaattaatgtttaccaaacactatattgttctcccgttctctcttgctgttaattgggaccctgtgatagtcctggctgaaggactgtgaaggggagggaagaattaatatcccagggcctaactggttaagagcttgtgtgcctctttcaaccctcactttccctggaataaaccttggagctatatgttgaaatagaaaataaaaatatggatgaatcttggtcgtctgagtcaccagatagaggagatctcttgccaatctgcacgggattttgcatgaacaaaaagtcaccttttactgggataagccacagaaatttcagagttttgtctattgagacagctagggttagttactgtaaaaatactagggcctggaaaaatgttggaaggattgagagagggaagatcaggttgcaactactagtatgcagaaaatcataaagcataggaactgcaggaaactgtcaccaatgatctcagctgtctacagcaccaaagtgagtggtcagtaggaagatacttggaagctgttagcaaaagctcacatctggggtctacccaagtccatgtgactgcctgtctcaaaagagtaataatagttctatttatcttttgtctttgaaaccttgcatgaatgagtctaattgtcttaatttaaaccataaccctgctggcagagattctaagaaatgtagttctcatgcttccaatccctataatactaaggagagcgtagaaggagaaaatggtgtcaaattgccaaaaaaaagaacctggcatatagaagtagcccaattattaggtgatgacatgccccagtttgtctgggacagtcccaatttattcctgttgacctagagtaatttttgatagtaccccgtttcaatctcaacatgttccctgcttggacactaaattatatggacatcgacctattaataacatgataaaaatactttatttcatcaaaaaacacttattcaggatatgctaagtgctaatcattgtgtgggacattggtcaacagaggcatttatgaccttggcattcatgaaacttagagtcgaatctagtgaatgatgggagcctaaacaaggcaatagctatgaggatggagcagaggaggcatactcgaaagaggttgaagaactaaatcatacaggtcttgataactagcatactggttaagacccttaggctcttacgtcagactatccaggtttgaacaccagctctatcacttgttgggtattttaacttgggaatttaccaactaatctctgcctcaacttacaactctgttaaatgggaattataataatacttataagattgttgtgaaaattaaatgagataaaaatttataaagtttataagagggcctaaaatatagtaaatgctcaagaaatatcattatagtgaagaaattgtggtggttgttgttttataatggctgaatatgagagaactgttaagaaaatcctaggtttctgacttgaatatcttgatggatggttatgtaaaataataaatgcagaagaagctgatttatgtgggggaaaatagtgcatatagtttgaatggattgctagaagagtaaacagaggaattggcattctaatttaagtgggggaagtaatgcatttggtttgattatgctgagtttgagggactggtgggaaatccaaatggcaaggtctgatagcagctgaatagttagaattggggctcagataaagatctgagctgaaatttagacttgtgaggtttttttttttttaaaaaaaaaacacttctattttaagtttaggtgtgcaagtacaggtttgttacacaggtaaacttgtgtcatgggggtttgttatacagattatttcatcacccaggtattaagcctagtacccattagttgtatttctggatcctctccctctttccaccatctcacaccagtcagaatggctgttattaaaaagtcaaaagatttgtgactttctagatggtagctgaagccaaggaaatttgggagatgaattagagaaggtattcagagtagaccagaactttaaagggcagaggaaaagaaacatatgagaaagacaagaaggaattgccagaaaaatagaagagaagcaggcaagtgatgtgaaggaaggcgaggaaggagagaaagccagaaagaacagggtggacgatggtgttaagtgtcaagcacaaatcaagaagatgagaacagaaatgatttccacagattcagcaattgagggcttttgctgattttagtaagaatagattcagtggagtagggaaggtggaagtcttctcaggtcaccaagggtagaggtaagaatgagaagagagaacatatagatcatgaaatattaatcttcagggtgcttggctgtgaaggaaaggaaagggtcaactggtggctagaggctttttaaaagcacagcctacaagatcctttggtcctagagttgcacaaaggatttgcagaccaggaaaggtttagataacatgaccaccaaagtcttccccatttcaaagtgtttattatttcatgattctctgcttaataagtaccaaggttcagcttttattttcacaggttgttacctgtaaagagggtacaaaatctgttttatcctaacaaatttaagttagaatttagtttgatcttacgagtctttagggaaatatattttaggagtcaaaatgtgtatctgtacatagtatatttatgaatattgttcttaatttttaattcagtacctttacaaattattttataattggttcctgttttcaaccagttgcttgtgcttatatatgcaatttgtctatttttttcatatctgttttcagcttctcccaaagaattatcattaggtcataacactgggggaggtttactgaatgatcattcttttcaaagactttaccatttcccccagagccttggttggtttattgactagagcaaagcagttagtttgctattagtggaataaggtaggcaaagcatctggaaatgttctaccaggaggagccagtggccttgttttcgaaaagtcccaggtctcccatcactccctccagtcttgctagggcatgaaagaatcagaatttataactgcatcataattctgtactacagcctttcatctgggatcttctgtttggaaagtctcttcaaatgttttcttagcctcaagggaaaaatttctcccagagatacctcaattttgatcaaaagcattcacaagtccacttttagttttttctctaccaattaaagtcctcttagcttggtagattaaagctcataaaactggttccactggtttattagaaaactcactttagctagaagagtcgaagttttgatatacacagaccctagagagctaggaaaatcttacttttctccaaaggattcaagtcctattatttaattttcatctgattttggccaagttcagatttttgctgactgtgtaacatagcctattcatttcagctacaaatagttctcttttgtttccatttacttagaaattaacaaaatattgccatcattttatgtgttttcataaatgtatttaaagccttttataattatgatatttaaatattctgtttttaaattccaaataacattagttgagagatgcatctttgacataaaaaaaaatttcaggagaaaaatttcttgtaaaagcttctcaatgagtgtatacattgatcataagaccattctaattctagaaacattaaatatgaaaaagtatacttttggaattgaaaagatatggcattaatggtcatttcacttgacttgaggcttcccatgtgtgggattcatcattacttcatatgcatctatctaatcttcatttatccattcagctcacagttattgagaacaatattaagtcttaagctcttttgctaagcaacggacaatgaacactccctggtgctagttagcatccgaatttgtaaagtgagccatttgttgtatgttttaaccttttaaaaaattcagcatttttctctaaatattttgaaatctaactcaagaaaaataaaaatcacccagtggctttttcacataattttaatcacctttattcttctgcttatcctgtctcctcagtcttacattcccctacactatgcagcaacctgagttgatagctatcataccacgccatgctactctcatcatcatacggtggcatgattaagacagagaagacttgaaaataagtatgcttaaaatcttcagaaaataaaatgtgaataacatccactaaaaaataaaaacaggagtttatgaaataacaattaagtggtaatcaaattagaacatgcagattcaaaagacaaccgattgaaatgattagaaataaaaatgtatagtcatttagaatttctagaaaaaaatctaaataaaaggaataaataaagagaatgctgtcaaagggagactttataaattggatcacggaaattagaaattaccaaactgtgcaaaacagagaaaagagaactgaaaatataaaagattttgtaatgcaagaagttctattatatataagtaaatagttccagtgggagaaaatagagaaaattgctgaacagtttctagaattaaggcaagatgtgagtattcatattccaaaaaggacaaatcatgccaagcaagatgaaaattttaaaacctctttctatatttacattataatgaagctaaagaacatcaagggcagaatatttgcttttctgaatggggagatatgaaatatcattgaagctttccttgattactagaggtttattcctgcattctgttgtgataacactttcttctatgttgatttagttatttgcctgctgtaacttctcatgcagtcattgtactggcctccagctcacttttgtttactgctgttctatgctatttgctggacaaaccaaaaaactgcctttgttaaaagacttacaataaacaacaatagcttattaaacgaagaattggctttaaagaaggtacatgatactagcgtagcaaaagctaacattaatcaggtgttttctatctactagacatttttacaagatttttctcacttaaccctcacaatgtccccatgaggctggtattactctatcacccccattttacagatgaggaacctgaggcttagttagagaaactgattcacttgcccaagatcatgtggctttagcaagtatgttaagtggtgcctcctagattttaacaaagtcaaattctaagcccaaaatttttaaatactcctttttcttatcctttttttttttttaacttttattttaaggtcagtggtacaggtgcaggtttgttacctaagtaaacctctgtcatggggtttgttgtacaggttatttcatcacccagctattaagcctagaacccattagttatttttccttgtcctctccctcttcccagccctcatcctccaaaaagccctagtgtattttgttcccctctacatgttcatgtgttctcatcatttagctcccacttataagtgagaagatgtagtatttgtttttctgtttctgtgttaatttgctaaggataatggcctccagctccttccatgtccctgcaaagaacatgatctcgttcttttttatggctgcctagtattccatggtgggtatgtaccacattttctttatcgagcctaacattgatgggcatttaagttgatcccatgtctttgctattgtgaatagtgctgcagtgaacatatgtgtatgtgtctttataatagaatgatttatattcttttgggtgtatacccagtaatgacattgcttggttgaatggcatttctgtctttaggtctttgagtaattgccatgctgtcttccacaatggctgaactaacttacactcccaccaaaagtgtataagtgttcctttttctccacaaccttatcagcatctgttatttttgactttttaataacagacattctgactggtgtgagatggtatctcattgcagttttgatttgcatttctctaatgatcagtgctgctgagcttttttttttttgtatgattgttggcttcatgtatgtcttcttttgagaagtgtctgttcatgtcctttgcccactttttaatagggttgtttgttttctttctgtaaatttaagttccttatagatgctggatattagacctttgtcagatgcaagtttgcaaaaattttctcccattctgcaggttgtctgtttactctgttgatagtttctttggctgtgcagaagctcttaagcttaattagatcccatttgtcaaattttgcttctgtggcagttgcttttcatgaatcttcatcatgaaatctttgcccttgcctctttccagaatagtattgcccaggttgtcttccagggtttttatagttttgggttttacattgaagtttttaatccatcttgagttaattttcatatacggtataaggaaggggtccagtttcagttttctgcatatggctagccagttattccagcaccatttattaaatagggaaacctttccccattgcttgtttttgtcagcttcgttgaagatcagatgattgtaggtgcatggccttatttctgggctctctattctgttccattgatctatgtgtctgtttttgtaccagtaccatgctgttttggttactgtagcctgtagcatagtttgaagtcaggtagcatgatgcctccagctttgttctttttgcttaggattgccttggctatttgggctcttttttggttccatgtgaattttaaaataaattgttttagttctgtgaagaatgtcaatggtagtttaataggcatagcattgaatctataaattactttgggcagtatggccattttaaagatattaattatttgtatccatgagcatggaatgtttttccatttgtttgtatcatctctgatctctttgaacagtggtttgtagttctccttgtagagatctttcagttccctagttagctgtattcctaggtattttattctttttgtggcaattgtgaatggaagtttatttatgatttggttctctgcttgcttattggtggtatataggaaggttagcgatttttacacattgattttgtatcctgagactttgctgaagttgcttatcagcttaagaagcttttgggctgagacaatggagttttctagatataggatcacgttatctgcaaataaagataatttgacttcctctctttctatttgaatacactttatttctttctactgcctgattgccctggcctgagcttccaatattatgttgaataggagtggtgagagagggaatccttgtctagtgaaatctgattttcaaggggaatgcttccagcttttacttattcagtatgatgttggctgtgggtttgccatatatggctcttattattttgagatatgttccttcaatacctagtttattgagattttttaacatgaatcgttgttgaattttatagaaagccctttctgcatctattgagattatcatgcggtttttgacgttagctctgtttatgtgatgaatcacatttcttgatttgcatatgttgaaccaaacttgcatcttggggttgaagcctacttgattgtggtggataaactttttgacgtgctactggattcagtttgatagtcttttgttgagaatttttgcatcaatgtttattaaggatactggcctgaagttttctttctttctttctttctttttttttttttttttttttttgtatttctgccaggctttgttatcaggataacactggcctatagaatgagttagtgagtagtccctcttcaattttttggaatagctccagtaagaatggtaccagctctttgtacatctggtagaattcagctgtgaatccatctggccttgagctttttttggttggtaggctatttattactacctcaatttcagaactcattattgttctattcagagatccagtttattcctggttcagtcttgggagggtgtatgtatccaggaatttattcatttcttctagattttttagtttatgcgcatagaaggttcataatattctctgatggttgtttgtatttctgtggagtcaggggtaatatcccccttatcgtttttgattatgtttatttgaaccttctctcttttctcctttgttagtctagctagcaatctattttattaatttcttcaaagaatcaactcttggacttgttgatctttttaatggctttttgtgtctctatctccttcaattcagctcagattttggttatttcttgtcttctgctacctttgggatttgcttgctcttggttctctagttcttgtagtggtgatgttaggttgttaacttgagatctttctatcttttggatgtgggcatttagtgctatagatctccctcttaacactgccttgtctgtgtcccagagattctggtacgttgcatctttgttcacattagtttcaaagaacttcttgatttctgccttaatttcattgtttacccaaaggtcattcaggagcaagttattcaatttccatgtaattgtatggttttgagtgaatttcttagtctttatttcaattttgattgtgttgtggtccaagagactgttaatatttccgttcttttacatttgctgaggagtgttttactttatgtgatttattttaaagaaagtgccatgtggcgatgagaagaatgtatattctgttatttttgggtggagagttctgtagatatctatttgatctaggtccatttgatccagggctgagttcagatcctgaatatctttgttaattttctgtcttagtgatctgtctaatattgtcagtggggtattaaactctccagctattattgtggtgcagtctaagtctccttgaagttctctaggaacttgctttatgaatctgggtactcctgtgttgggtgcatatatatttaggacagttagattttcttgttgtactgaacaatttactattatataatgcccttctgtgtctttttgtttatctttgttggtttaaagtctccttcgtcagaagttagaattgcaacccctgcttctttctgtttcctatttggtagattttcctccatccctttattttgagcctgtgtgtgtcattgcatgtgacattggtctcttaaagacagcataccaataggtcttggttctttatccatcttgtcactctgtgtcttctatttggggcatttaacccatttacatttaaggttagtatttatatctatggatttgatcctgtcatcatgttagctgattattttgcagacttgtttatgtggttgctttatagtgtcactggtctgtgtatttcagtgtgtttttgtagttctaaacccaaattcttaatgactactctatatcttttttagtggaaaaaaagactttatttcttaggaccccacacactataagcccctatatatttctcttgaagcctgaaagtcttgacttattcttcagctgtaatcagctgtggtgtactttggggacccatcactagatttgcactgtgaggttacctatgctccatttctccagtggcctggtgctatctgactcaatctggagtaatatgcatgctttgccaagtgaatttgatgactgaagggttccataagggtctaagataagcatagatgcatattggcatcatctgcttggaaggggcctttaaaatgtcaccattcctcactatgctacaccaaggaaggggggataattatcattgcttgtggtaggtgaggcaggatggtcagagcacgtactttgaacctcatcattctgctaagtactactatacgttatttttttgactatcattatcactgacatctaggatataagcacctgtctttactaatcagacttagtaagacattttggtatgtgttgagaaacagtaatattgaacatataaccttacagatggaattacattttggatttaactatcctgacatctttttctttaactctcctaattgatttccattatgttgaaatccaagtccatcctttgaaatgttagcgggaagactgaggattgaaatgtgtagatagaaaaatcacagaatttaacttaaagtacatgaaaaaattccaatgaaattataaccattaatatccttaatacataaaatattcatacaaatcaataataaagaatccccatgactgcaataaataaataagtaaaggtccaaaataaataatttgtaaaaaaaaaaaaaagtttaaaatgttaaatcccagtagcaatcaaatacatataattcaattcaaaacactgaaatgacacttgtagtcttttaaattagtgattttaaaaaaacaaaacaacaaaaaaacagaatattggtaagagagcaatgaaaaatgagttttcatacactgtgggaaaataatttggtaccaactatttaaaaagcaatttggcaatactgtatacatcaagagctacaaaattaccctttgactaattttacttctcataaattatcctgaaaaaaattcaaatatctggaaaagctttagttcaaagctaatcattacaatgttatttgtaatgttaaatatcagaaataaatgaaaattactaaaattgaaaaacagttaaagtttacttcatccttaaaaggaatatttcacagagaatacaaatagaaatacagagagactgtgaaatagcacagataaatgtctaagctttaatgtaaaatgaagaatatacatatgtaatggatcaactataagaaacttaaaaatatgattaagaaagaaagattaaacaaaaataccaaaatttcaacaaagattatctcttgttaatggggtttgactatttcttttctgtgtttcccaaatttttatgatgaatgtgatttattctattttaagagggaaagaaaatttttttatgaagaaaaattgaattaaaataaatttttatggggctgaagaaaaggcctctataaatgtgacttgattgggaagcttgtgaattttttctgtaggaactgagtatttatgatctttttttttttgagatggagtctcactctgttgcccaggctggagtgtggtggtgtgatctcggctcactgcaacctccgcctcccgggttcaagcggttcttctgcctcagcctcacaagtagctgggactacaggtgtgtgccaccacacctggctaatttttgtacttttagtagagacaggatttcaccatattggccaagatggtctcaatcgcctgacttcatgatctgcccacctcagcctcccaaaatgctgggattacaggcatgaggcaccgctcctggcctatgatcattttatatggactgatttaaaatctgttttgaagccaggtgcagtggctcacgcctgtaatcccagaactttgggaggctgaggtgggataattgcttgagcccaggagttcgagactacccaggacaacatagggaaattctgtctctataaaaaataaaaatacatttaaaaaatcaaataaaatctgttttgaatagccatcaaaaacaacttctcctacactaacatttaagagcgtgaaaggtggcaagaaaagttctatcatagcttagatcctaaactattctacgcaagtttttgatgggctctaacatgttaatagcatatatgtaacactaattacaaagaaacctcatttcttcattgaaaaggttatcagtttaatgcagtgaaatctgactatgtgagtgtgagtatatacagttgtgctaatatcagtttgtagtcgttcaaggctaatcttcccactccagaggaaatttttttatcatatatgcatacattgctgcactgaataatgggaacctaaaataaaaaagatcattgcctattttatatgctccataaaattcactgacagtaaccaccaacatcccaggtatcgtctgcagtttagaatcctgaatattttccccaaaaatgtccgataagggaagcaatttaagcaaggcagacagtgctgctaacagagaccatacagtttcagccagcgagtctgctgactgaaatgaagtccttggacctgtggtttttttgtggggttatttgctcttgtagaataaggctctcagaatttcaataaaagggtgaaaacagttttgaaactgagaagactgttacactgcctaagaggaatagaggtgtgattgagatgtggtgaaagaatctgaaagttgagttgtttttttttaagtctcttcccgtgtctatgtcctgccatttcttagatttatacaaacccgacccaaaaaagggtgtcaggggcttgaatccagcaggcactctcatacaggtctgttataccacttcaccttttatagtcagtcgacaggacagggggaattacttagtatacaaagaagtgcaagggaaataaaacctatgcaaatcacatttgtagccttctaaatatttgacctatatgaaaaattccagctttgatttcttagtccaaattgcaaatcagccaaacgtagctgattctgtcctatatgaattggttattactgtctttccctttcttagaacccctgggaacaaacaagaaaaagtaaggaaaacaaaatacttattaaaatgtaaatacagtggctggttccctgatatgttatgctgacaacccttgctggcaacccaggaggacccaggtgcaccaggaaccgacttatctggtcacagaacatcgggggctggaaattgacagcctctgaagggggccttttgttacttgacttctgtggcaggttgctggctcattctcctgcatggaagagttgaaactcgtctttcaactaaatggagtacatgagggcagagattcttttttggtttggcaacccaagtatattaggaaaaaataggcactgcaaaatagcaggaaagcatgaagaatgctttatgaagaaacataaaagaaaaccagaggaaagcatattcagcctcagtcattaaaaagcacactactgttcccagtcttgccttctccaaaagtttgtttgtttgaagtttcttctgcagaactctaagcaggtctccaatataccgacatctttaacagcattctggaatgagaggagtgtctattaagggagacatactcctctatttcatttggaattttacacaacagttttctgtgtggcttaatttttggcatcaaattgttttaacagaagctgtgcttttcagttagatctttatctttgagttctagtgtcctcccacgatgcccctaggagcctatcaaagcaggccaaccctgcagaaatgcctagaataaaataacatgcaaatgccactaagaacttgcttccctcctgactcatattttagtttctataaagtgtctgttttcaaaactgacagtgtctgtagcctgttaatggaagataatgatttgcacaccaaaatgggagtaatcacagggctatttgacactgtccttagaaaaattccttacttactcaaaagccaaagcaaagaactatttctaaaatgacaaatgtgtgtaaattttcaaagtggattgtgatttcacccaggaaaacacaggcagccagaacacagttatgctttagtgtatatggtgatctaattcttgaaataaaactttattctgggcaatagcatgcatttctagatgagaggagaaattgttattgctcataataaaggacgaaatgtttttcttatttgggaacttcagggggatgaagtaaggaagtgggctgcagaacactgggataaatcttatttatttaacatttaatgctatagtctgttaggaaacaaactcactgcggtataattatttaatactggacagtaaaatcatctgctaagattagattaagtagttgactcaaagtactccccaggttcaaggctcaaaaatgaataaatcaacatgcttactgtacagagcccttgaacattatgtgtgctgggatggtggcttcctgaactatcgcctcttgtttgggtctgttgtgaagtcaaggcttgaggacatgacctgacctctttatttaaaaaaaaaaatccatttaatatcagttatcacttgaagaatttaaagacagaattatttgctcagaaaaatttgatgctttgtgctattaaaccctcagtacacagaaatagatttaagcaacatggtggtgaatcaagccaaggagagctgggaagctggaattgatggctcagtattctctgtaataatgtgtcaatttatgcctggacattttaggatgtctgtttatacaaatgtgaacaaatgtacctttgacttgtagccagggtgaacccagtgccaaaagaatagctcttctcttagactgggtttctcatttttttcagttttgtgactggcctagggtgtattttccttattggagccttgtgttgttgtcaccttcatccatgccaggttctcataggactaatccccaaggaagtcatccccagtctactgggcacactgagggaatccacgtgtacaatggaggcttaagctgtgagctttgctatcaggagaacctggctttaagtcctgtttctgcccattattatatatgtgaccataagtgagttgcttaacctctctaagcctcagcttcctgatccatacaacaggaaaagtactagtacctgcatcctgtgttactgtgaggttcaaaaagtaaaggaactaatgcacataaagtgtttagcatattgcctggcacaggatagggactccataaatgccagctttctttatacaaagaaaaacgtctttgccctttagttaatgttctcctgtccatgtcaaggtcagcatgacaccatggtagtctgtctagcttgtatttgtgtctgctgctcacataattgtttcttcacttgctgacctggttggctgaagttttggccatgggccaccctgtctgtgccccctggctttggatcccatctcgtcctatccacaatgtcaggagcaaagccacttctttacatacgtggcagaatccagccagacactctgcatcagcaacgtctccacagccagttgcttggtcttcagcctgtcaggcgctgagcacttgttctccatctgaaccagctctgtgctggcctctagcaattataatgcacctgctgatgcctcagagagccaggccagactgacactttcctctcggtattctttaattctatgcttgaccagttccagcattctttcttcttggtcccagacactttccacctcatctcctacatgtcacatctgatttgtccttattgtagaaggtaggtgtaaggcctaaagagtgagtgtggtttgttgtcagctgctccaaatggggcagcattggcaggaggtgcaggaactgatagaataagatttctatatcttttcttgagtttgtgacagtgctgtttatggtcaccagtttttatttgaggaattatccatttatgcaaaaaatgttttttattctatatatcctttaaaaagacatacaggttgccctctggaaatgagtcttaagcatgtctatagtatagctatatcatccacatcttgagtcattttgctcagtggattttcttaattctcaattaatttgtattctgtcagacagtctagtgagggagtaacgagtggtaagttagaaggtgacaattttatccgaggtctgtgcatagggtacagtggaagaatggagacggtgatgcctcatggcctcagcttacagtgtgatttgtacattttctgtgatttctataagtaacaggctgacagtgttggatttgctgtgttgtgctttgtatctacctttgtactgcctcttttttcccctcccacgctgactttatctcattccttgttttccttgagaagattgcactggaaaacttgaagaggggttagaaggtggggccatagtagataccagtaggaagacttcagaacagaccctgtcccctgctgtgatgatgccttgtgacttaacactgatgaccttacatggaggatttagtgaaagttatattagaaagcaattcagttacttccagattgttattgaagtccagcctctgtggtctacctatgccattagtatttgtcctaggttatttttgctttcgtatgtcagagaatggtctcaacgtaagggggtctgagtcagggtggtctagttgaaaaggtatgggcattggagtaaaaatataaaaaatctggattcatatccagcctctagcactgaatagctctgtgacattgtgcaaattgcttacattcttttaacttttgtttccttatctgtaacttggggatccagatataataatactgtcaggtattatagaattattgtgaaaattaaatgagataatgtctggaaagaacttagcacagcgtctggcatagtgttaagtacccagtaaatcctgattctttctctcccccagcctcactgcctcaccagctgcccagctgtctctaaacacagcatcagtggaactgtaaatactttcacagttatgtaatcgctctccacaaattcactctttgatcacctttctgccctccctccagatctattcctaaactcaattttgactctccctctggtataatctccttctctctgcagagaacagtaagaccttaatgtttaaaaaaatcatttcttcttaaaacttaaaggccctaaaacatcattttgagtttttgtctccagcagggtttatttctgacaacaaaattaatatatttatatttaatatttggagcttttattttacaatcatcttgacagtaatatttttctgatatttgaaaagccccatgatttttctgtgcagagaatgcattttgttaatttatctaagtggctgctaggcttttaaggttttaggttcattttttatttttctggagctcagtcccctaaaatgcaaatgagtcttgagcagctcttccagaagataaattattcttcttttctgtctcctactgttcaaagttagtgataatttttagacccagcagttgaagattttgacattcctgttgatataaatgtggacattccaatgttgttcaacttctgactgtcttagggactgattgcttatctctatcagccaagaaaatgccctttgcattggtctcatctctcacccacaccaaccaaacacatatatgcaatctaatgtctataggtcacattcttgccactttatctctttaaaattggatagttttagatggaatttgcaggtgctaatatggaccactgggtaacagggatagatacagtagcattgttagattatattctctaagttgagatttttcacctaaaaagagacagaagaagatggaggttgcacagtactggtcagatcttcccatgcagtttatcttttggaagggcaacagtataaagcagttaagagcattaattggacattaggcagtcctaggtttgaatcctggctctgacacttattggctgtataatactggtcaagtgacttaatttctctacctctcagttttattatttgtgaaacaggatgacaatattacttgctttgcagaattaaatgaggtaatattttgaaaattatatgagctattatctaaaaacatttagcacagtgactggcacagcatagagtgcccagtcaatcttggtcccttctccccagttttgccctgaatgttggccagctttgctgcagatgctttctccactatgccattactctcatccaatcctttcctttattagctttcttccctagccctcacttcttctcttggacccagtgtgcgcgctctctctctccagaaaaataataattttaaaaaaatcagttcttcacatgaatgcaaaacacctactacaatgatgtgggtgatggtgatgatgataagaataatgtgggaactttttaccctttttgtcctctggattgtaagtttcatgagttcaaagataatgatttcttcagcaccaaatgccttggttcctggaccaggaatagttggtgaatggatgaatctgatattcagagttgcaatgattgcggcatttaatcttttttatttctgcacagttaatccaaatgagtatttattgatttgtatatatatttactacttctattgcaaaattttagtttcttcttttatgaaatagaattcttaaatgcatgcttgtgcatccaagaaggacagtgatgatgtgtttcaatgtattaaatgttgaaatttaaatgttggggcatgttcttgaaatggtgactacacaggggaaaaaaatttaatagattggttttaaggtttgaggacgggggtcctgggaaagtgctgagaatggaggcatagcattccttcccacactcagcacataactctgcatggatttggtttcatttcaaaaacggagtgttcacagactgaatacacctctgtacacttgaccctaggagggcagcagataaacttggggagtcttttttagacaatattcccctgaggttttaagtaaatttttacaagctcctagaaatacttttaagaatctatataaaatttctcccttaccttaacagcttttacttagaagatatatcaaaatgaccccaaaaagcaaaagctctataaggtcagctaatccattaccttagcaatgtgaggtgcataaaatgtgaaccactgaaatttcatgtaaacacctcgcagtttgctctaaattttcttttatctcaaggatgcaaatgtgtcttgtgcttcccataattgaagaatgaaaatgtttgagataaatagcccttcccctgagaggccaaatactttccttgaagaaatgccagtcctatgtccctgtgggtagggttcagtatttgtagagtcgccaattataatggcccagatctaataggaactcaaggattccagcctatttccacctaccccacctgcccaagaccagccttatttccaggctttactctcccttaggcatatgtggtggcaggcacctgtaaccccagctactcaagaggctgaggcaggagaatcgcttgaacctggggggcagaggttgcagaaagccgagaccatgccacagcactccaggctgggcaacagagcaagactccatctcaaaaaacaagtaataacaataataataataataatattaatgatttaatgttcaaaaatatcctatgtccaaaagttctttttataaatctgatccatatcgctattgttgcagcttaaaattctgttacacgtggtaatacatacattaacaaatacgtatagggctccttgatttaccaggggctgtgtgtgaaaactacattaatcataattaactgccaaatggttagaacagaaaataacagctttgaagtccagagaaaggagagagtggagcaggaggaattggagctggatcttgtaagatagttgagatatgcataagttgagagaaaaagaaaggacaaaccagatggcataaatggtgtgaggaaaatcacagaaatggaaagaaagtgaggaggccaatttacatggaaatgaggcttttggaaaagggagtagttggaggtaactcttggaggcagatcggaatctatctacatagggccttgaatgctatactaaagaggatggtctatcccatagaccagtggtgtccaaagttaggaagtgtgtaggaaaatacatttgtatatagaaaaagatgtattctttatatagaaaaagaaatatattttactaataatttcttgtattgacaatgttgtatatgtgtcatttatatgtaaatatgctatgtggtgatccacactcaaaattgttttattgatagagatacatgttcaaaagaggttggaggcagatgactgctataggtgataagggatgattaaaggttttcatgcagccagtgacatgttcaaagcagtattctaagaagatgaatctggcagcagttataccgagaggattggtggaagcagttagttggcgattgcaacaattcaaagggcttaaattatgatagccacagtaggaatgtaaaggagggggagagttccagggatgttcggataatcttattatttgcatggtgagattttcctttagcaagagtattcagcaatctctttgggggctgagaatagagcagtgctcaagaaggtgagtttttgtttgaaactgatttcaaaagtgggttagtggtcaggcgcagtggctcacacctgtaatcccagcaatttgggaggccgaggcgggcagatcacttgaggtcaggagttcaagacaagcctggcaaacatgacaaagccccatctctactaaaaatataaaactagctgggcatggtgacaaatgcctgtaatctctggaggcagaggcatgagaatcacttgaacccaggagtcggaggttgcagtgagctgagattgcgccactgtacaccaacctgggtgacagagggagactccatctcaaaaaaaaaaaaaaaaaaggattagtactaccccaaatgtactatggtctgaaaacctaaacttaaatgtgaccaataattaaaaattacattaattactggtcaaaaacaatataggattaatcctttaattgagtatagataacttcataactaattttatacacaaggaaaatctttgaaaatgtagataacatcttctccaccataatcataaaaaggagcatgataacagaagtagcttaataatggttcctgcattatattaaaaaaaacttatgcttcatatttgctgtttggtgttgaaaagggatcccagaaattttctcatctcagttgcttgttggagatgcattacttttttataatacatgattcaagtacaaacagttgtttttcctcacacagcttgatcttcacaaaaaataaaatttaaaaaaccattttggtaaatgtaaatttgtaaaaggaggttttggtacttgtacttgatttaccatcattttctttaaaattgtactgttgtttaacttctcaccagttgatgtttttgtaaggtagaactcttaacaaaagtgtgattcagagttcaaatctattattagccaggcttctcaatttctccttgcacataaaaacatggtaaataatgatagagaaaaagaaatagcatgtttgaaaatgccaactagatcaggcttgtgattcctacatgatactagcattatcttagacatgtgttgataaaagagccctactatcaggcaatttaaattaaaaaaaaaaacaaattcacatattttaactcttgccaggcatcggatataaacttaacaattatctcaatcaaggtaaaatagactatagattgtgtgtgcatatgtgtgaaaatgaacagaatatagtgtagaaaaatagatacaatatgacacataaaaaagaagataagattttaaagttctacattaagcaaaagtaacttttctcaggcattgctggtagaaatataaattggtaacctttctttagggcattggtggcatgtgtcaagagccttaagaatgtttatactgtttaaactcagttctatatttctatttttaagaacttgtcccaagaataaaatccttaaatgcccaataataagggagtagctaaaataagtgaagaaccatttttgaacattattgattataataaggaccatatgtgccctgactttaagtggaaagggcagtagaaaactactattgtttacatacatttataatttttgtacgtacatatttgtatacatacatttgtttacaaaaaatgtaaagaagtataacaatattcttacaagttgttttggtttctaattttttgtttctctcaattttaaattttaaaaaagatatgttgctatatattgtatttatattcagaaaaattatcaaaataattttaaaaataaaataattaaagagagctcccagagtttaaaatgtaaatacctatcatttaattcagttagctgatggaaaattttggtgaccattacatatttatttaatgacttagtcaacaagagctgttgatgtattaaattttgagtagacccagctgtgctacaaaagtaggtaatgtaatggcaactaaagcaaatgtcaaagctgaagcacatttaattatcttggctactggggtgttttaacctgtgttacttgtgctttggtctcacaaaaatggcatcttttaccaactttctaaactgagtaggcaatgcatgctttagattaaatgaaaaggtggtcccttttatttatatttatacaaatatattcattcagtcaatcaaataaacaaacatttattcagcaattgtcaaatgtcaggtattgggccagattatgaaaaagggaaatgagtatcagaaaattaatggtctaatgggaagatcaacatttaagggtggctgaaaatgaaaatagagttatgcatgcagttctagaggaacattgagaaaggggcagccaactctgcctttgagttaggggagccttcccagagaaagtattatagagataggctttgttcaatgaataggagtttcctagatggaaaaggtgaagaggtattctagataggaagaagagcatatacaaaatgtcaaaactctgagataacatggcctgttcagggactggtaggaaatatggtatagctagagcttaggatgagaagcagaagcagatcatgatggcagaccagaagcaagactagattgcagctgtcactcggatggacagaacagtgtgtggagacttgcattgtgaacttttactcaacaatgactgcaggaatacattaggaaagccaagagaacccatagaccctctgaaggaagcagattactcctgcaggacctgggagacaccccaaatactgtaagacaccccaaaaaactgtagaagtgggaaaaggagatcatctgcccctgaacatatatccccactggagagggaacctgaagttctagagtacgggagaagattccgaccttacatgcagctgagtcaatgtagagggccgagcaaaatatggggttagaggaagcaggagaaaagtccctgtgggctcgctggctcccctagcaagccacttctgcctcacctcacaggggtccttgaggaggggtgctagaggcactgggaaaaggccacagggagaaggaaacctccagctgaactttgtaacaatttgagctgatcaaaaagtctcctggccagaactggggggagggcatgaatccagtgtgcagactccacaggcaagggaagaaggaaagccctacttacttttgcagctgggaggcaagtagcctggggcaagttctcagccctgctcacccaccacctggaaacagacttggtgctgttgggaggggcacagtgagagtgagatcagccctttgggttgcctgggagctggatgaggcctgtgactgccggctttcccctacttccctgacaacctgcattacacagcagagagagccataatccttctaggaacataactccattgacctagaaacttcaaccccatcctccacagcagccatagcaagagtctgacatgcctagccctgcccccacctggtggtccttccctacataccctggtggctgaagacaaagggcatatactcttggcagttctagggacccacccaccacctgttcctccccatattaccacagatgatgctctcttgaatgtgccacctcccagcaggaggataaccagctcaaaaatagtgcactaatcaatcaaagctaaggtatcctcacagagtccatttcacctccttgccgcctccaccagagcagatgctaatatccatggctgagagacccatagacagttcatcacaggactctgtgcagatgaccccagtaccagcccagacctggtagacttgctgggaggctagatccagaagagagataacaatcactacagctcagctcttaggaagccacatccctaggaaaagggggagagtactacatcaaggaaacaccctgtgagacaaaaggaactgaacaccagcgttgagccttagaccttccctctgacagagctgacccaaatgagaaggaaccagaaaaccaactctggtaatataacaaaacagcgttctttaacatccccccaaaaaatcacactagctcaccaacaatggatccaaaccaagaagaaatccctgatctacctgaaaaagaattcagaaggttagttgttaagctaatcagggaggtaccagagagaaacaaagcccagtgtaaggaaatccaaaaaaatgatacaagaagtgaagggagaaatattcagtgaaatagatagcataaataaaaaacaatcaaaacttcaggaaacaatggacacacttatagaaatgcaaaatgctctggaaagtctcagcaatagaattgaacaagcaaaagaaagaacttcagagcttgaagacaaagttttcgaattaagcaaagacaaagaaaaaagaataagaaaatataaacaaagcctccaagaagtctgggattatgttaaactacaaaacctaagaataattggcattgctgaggaagaagagaaatctaaaagtttggaaaatatatttagaggaataattgaggaaaacttccccagccttggtaaagaactagtcatccaaatacaagaaactcaaagaacactgggaaattcatcacaaaaagatcaccacctaggcacattgtcctcaggttatctaaagttaagatgaaggaaagaatcttaacagctgtgaggcaaaaacaccaggtaaactataaaggaaaacctatcagattaacagcagatttctgagcagaaaccctgcaagctagaagggattggggccctatcttcagccccctcaaaacattttatcagccaagaattttgtacccggcgaaattaagcttcataaatgaaagaaagatacagcctttttcagacaaacaaatgctgagagaatttgccactaccaagccaccactacaagaaccgctaaaaggagctctaaatcttgaaacaaatcctggaaacacatcaaaacagaacctctttaaagcataaatcacacaaaaatacaatttaaaaacaaaaagcaaaaaaccaaagtatacaggcaacaaatagcatgatgaatggaatggtacctcacacctcaatactaatgatgaatgtaaatggcctaaatgctccacttaaaagatacagaaatgcagaatggataagaattcaccaaccatctgctgccttcagagacacacctaacacttaagtgctcacataaacttaaggtaaacggatagaaaaagagattccatgcaaatggacatgaaagtgagcaggagtagctattcttttatcagacaaaacaaactttaaggctctagcagttaaaaaagacagagggtcattatataatgataaaaggccttgtccaacaggaaaatatcacaattctaaatatatatgcacctaacactggagctcccaaatttataaaacaattagtaattgacctgagaagtaagatagacagcaccacagtaatagtgggggacttcagtactctactgacagcactagacagttcatcaacacagaaagtcaacaaagaaacaatggatttaaactacaccctggaataaatagacttaacagatatttacagaacattctacccaagaactgcagaatatacatattctattcatcagcacatggaactttctccaagatagaccatatgataggccacaaaacgagtcttgataaattcaagaaaattgaaattatatcaagtactctctcagaccacagtggaataaaactggaaatcaactccagaaggaaccttcaaaaccaggcaaatacatggaaattaaataaactgctcctgaatgatcattgggtcaaaattgaaatcaagatgaaaattaaaaaattctttgaactgagtgacagtagtgacataacctatcaaaacctctgggatacaacaaacgcggtgctaagaggaaagttcatagcattaaatgcctacatcaaaaagtctgaaagagcacaaattgagattctaaggtcacatctcaaggaactagagaaacaaaaacaaaccaaacccaaacccagcagaagaaaggaaataactaagatcagagcataactaaatgaaattgaaacaagaaaatacaaaagataaatgaaacaaaaagctggttttttggaaagatagataaaattgatagaccattagcaagattaaacaaggaaagaagagagaaaagcaacataagctcaattagaaatgaaagggacatattacaactgacaccacagaaatgcaaaaggtcattcaagggtactatgaacacctttatgtgcataaactagaaaacctacaggagatggatacattcctgaaaagatacaaccttcctagcttagatcggaaagaattagatattctgaacagaccaaaaacaagcagcaagattgaaatgataattaaaaaattaccaacaaaaaaagcccaacaccagatggattcacccagaattctaccagacattcaaagaagaattggtaccaattctattgacactattccacaagatagagaaaaagggaacagtccctaaatcattctataaagccagtaccaccctaataccaaaaccaggaaaggacataaccaaaaaagaaaactaaagaccaatatccctggtgaatatagatgctaaaatccttaataaaatactagctaaccaaatccaacaacgtatcaaaaagataatccaccatgatcaagtgggtttcataccagggacgcaggaatggtttaacatacacaagtcaataaatgtgatacaccacataagcagaatcaaaaacaaaaattacatgatcatctcaatagatgcagaaaaagcattccacaaaatctagcttccctttatgattaaaactctcagcaaaatcggcatataagggacatacctcaatgtaatgaaagccatctatgacaaacccacagccaacataatactgaatggggaaaagttgaaagcattccctctgagaactgggacaagacaaggatgcccactctcaccactcctcttcaacatagaactggaagtcctagccagagcagtcagacaagagaaagaaataaagggcatccaaattgggactcccgctgtctgctgatgatatgattgtttgcctagaaaaccctaaagactcctccagaaagctcctagaactgatacaagaattcagaaaagtttccggatacaaaattaacgtacagaaatcagtaggtcttctatataccaatagtgaccaaactgagaatcaaatcaagaactcaaccccttttaaaatagctgcaaaaagataatataataaaatacttaggaatatacctaaccaaggatgtgaaagacttgaacaaggatacaaaacactgctgaaagaaatcatagacaacgcaaacaaatggaaacacatcccatgcttgtgaataggtagaatcaatattgtgaaaatgaccatactgccaaaagcaatctataaattcagtgcaattcctatcaaaataccaccatcattcttcacagaatttaaaagcaaacaaacaaacaaacaaaaccagtcctaaaatacatacagaaccaaaaaaagagcccacatagctgaagcgagactaagcaagaagaataaatctggaggtgtcacattacctgattacaaaccatattataaggccatagtcaccaaaacagcatggtactgacatgaaattaggcacatagaccaatggaacagaatagagaacccagaaataaacccaaatacttacagccaactgatcttcaacaaagccaacaaaaacgtaaagttgggaaaggacaccctattcaacaaatggtgctgggataattggcaagccacatgtaggagaatgaaactggatcctcatctctcaccttatacaaaaatcaactcaagatggatcaaggatttaaatctaagacctgaaactataaaaattccagaagataacattggaaaaacccttctagacattggcttaggcaaggatttcatgatcaacaacccaaaagtaaatgcaataaaaacaaagataaatactgggatttaattaaacttaagagattttgcgtggcaaaaggaacagtcagcagagttaacagacaacccagagtgggagaacatcttcacaatctatacatctgacaaaggactaatatccagaatctacagtgaactcaaacaaatcagcaagaaaataaacaatcccatcaaaaagtgggctaaagacatgaatagacaattctcaaaagaagatatacaaatggccaacaaacatatgaaaaaatgctcaacatcactaatgatcagggaaatgcaaatcaaaaccacaatgcgatactaccttactcccgcaagaatgaccataatcaaaaaatcaaaaaataattgatgttggcagggatgcagtgaatagggaacacttctgcactgctggtgggaatgtaaactagtacaaccactatggaaaacagtggggagattccttaaagaactaaaagtagaactaccatttgatccagcaatcccaccactggctacgtacccagtggaaaagaagtcattaaatgaaaaagatacttgcacacacgtttatagcagcacaatttgcaattccaaaaacatatatatatactgtatatagtatatatatacagtatatatatactatatatagtatatatatacagtatatatacagtatatatactgtatatatagaaactgtagtgtatatatatacactatgtatatactatatatatacacactatatatatatactatatatgttactcaaccataaaaacgaatgaattaatggcattcgcagtgacctggatgagactggagactattattctaagtgaagtaattcaggaatggaaaaacaaacattgtatgttctcactcatatgtgggagccaagctatgaggatgcaaaggcataagaaagacacaatggactttggggactcagagggaaagggtgggaaggagttgagggataaaagaccacaaattgggtgcagtgtatactgctcaggtgatgggtgcaccaaaatctcacaaatcaccaccaaagaacttactcatgtaaccaaacaccacctgtaccccaataacctatggaaataaaaaaataaaaaatataataagcagaagcagaggatgagagtggaaaactgggctaggccagaaatggcctttatgcacttggagtcataatgtttctgcttcaccaatgattaacagtgattttcctggctaatagaatcttaatcattataatgaggtaggactgttgcctttgaattatggaaattatagctgttaagacctgttccacaaacacaggttatacatattatcacatctctttaatcttctttacagttaatcacccaagtctccacagggcttattagcaggaaggctattatctcctcttgagatccctcccactgcccctgaattgtccatgaatcctgactttactcaggccaaatgggtcagtcctcctgcagaagcccatagctggatctgtctgtgactgctgccctctctggtgtctgctatatggcaccatttgcacatccgtgtcacagggtacccattttgggtgacaaggttacaactctctttgtttacatttccatcctcagccattgttccctaaatcataaccactgtgccaggctggctggtctggaggcgcttctggagttggcctcatgctagtctgaaattagtccttctcctagaatctgaggccattttgttgagcccagatcaacagcccagattccgcccttctttaggatcactttatttccatggcttccaggaccttccctgctccgggaccttagtcagtgtcatcctgacccaatagatctctcatccccggcctccagttcgaggaaacggggatgaagacactagggcttccctccagaaggccctgggctcctttttccacacagattctcctcctgccaagtgtgcagattgtttctcggggtggctcaaaaggtagcagtttgcaagatggagtttaaaaaacagtttgttgccctgccctaatgctcccccaaaatgcctaattgctttatatttacataactaagaaagacaccaagggattcttccaaaaacaaagatcttcttcaaggtgatcttctgttctgcctttaaagagaagtagttgcagtttacttcactaaaataattaatttttgtctaaccatgtccctattttatcagtgataatgtgctcataaattatacgacagattatgtaatttgcccaaagcagaaagaggtctcagaccccaaacccatgcatttaaccactctgctttactacctcttgtcattcaattcacatgctaccatgtcattatttacttttatgtctcggatactgtactcttattagttaagtttattgcaggaatataaatctctttaagtgtaggcactctcttctgggctgttgctgaaagagagtgggacaacaggtgtatttgtgaactagtagaaaatgagtatatttactgcagaaggaagttgtgttttctctgcaaagttagatcacagaagggagaatgatacttatctatagttctggagggttgaaaccgaatagtaaatgggtgttaggatcaatacatattgttaagaaacagtgttctataaatttcatgatttaggaaagctgtctacaaagctggattaatctttttctgctgagggccaagtttactttgctctgcccctctctgtgcaagtgtaagacagtcaactgacctttcagattatcagcttaatgatagttctctctcagaattctttaaatttaagaataatgaaaaaaaagtccaaagagatctttttcatcatttctcttctccctattattattactctcctcaatgaaatgaaaatgaaatgcctgtgtatcctatttcataaaccaaaaccaagttctgacacattattggaagtttatgttgctttagaggaaaaccatgttggctataaactgttgcattatctggaaatcatactgtagattccaggaggtcaaggcgtctctggcaacttctatatatttataggagaaccgactgcctctcctctaacaaaacctcaatgagacctgactcctagccagctaagactcggcatggtcctccctgcgtcttcaaattctaggactttccctcatgtgcttgccttggactggagctgcaagctaccaagccagtgccagactgggggccaggcttacagcagagcttccacttaccccaaatctgccacagaattaattccctacgtttgacctcatattactttgttttgttactatcattgttactgctttagtattgttgttgtcgttgctttcctgtatatatttaagacttgtggcttttaaaactagtttggatttaagatacacaataagttctatcatttgaaaatgataaatatagatgtccttacatcaattgtcttcagatttcggatatatttagccttttgactttatccaaaaactaaacattctgattggccctcattttaaaagggaagaacctgtttctatttatttagatttgtatatgctctatattgggatgagggagctttttgtactgaaagaagttatgtattttcctacaggttagataaaatctgtgttttcccttggctaggtttatgcatgctgtataaacaaaggtgttctggggctcctaaggaagcggtctgaggaccatgtgtctcacctagttctcccacatgctctccctggtgactgttggcactgaccagaaaggtctagagtggtggagagagaagctaataaacaattcttgaaaacctactatgtgccaggactatgcttgatatacatttgctttgttttatttaactttcataacaatcccagcaggcaattaccattttccttattatatagatgaagagattaggtattataattaatctaatctcacagagccagaagtggcagagccaggagtaaaacacagctcagactccacagccaatgcctttctgtaccctacaccgtccatcatggatttaggtagcctggggacctgaactccccactaggtttaaggtctaattcttgaatgaaacctcacgcatttctcttaggttcagggacaatcagattgtcagagtagaaagagactttggattcaacatttgctaacccactggcttcctaacttcttcctaaggccttcactctgtgaagtaggtgctagggttccctgctaatgagtactaagcttctcaagggcttgagcaggcttgttagtctttttagggccagctgtgcaccaactatgctgttgttgtgttgaggccttagcattcctcacttcaaatcaattacttctttattaccttaatacatcactggccatgtggctgatttggaatgtaaaggagactaaccctgtaggataataactttcacttggcacacaaaatctatacggatattcagagcatttgcttttaaaaaatgaatattctgtagcctgtgctgcctgtttattcttatttagagaatttcgtcattttaataatttggtaatattttactggtaggtgcggagatatgtaaaaaaaagtgtatttttttcttttcttgtggatttaaaaaatgtttagaatttttatttgcagcctataaacaataatagtactttatcctttcttatttttgcctatattacaagcaagtaatttcatttaaattgactttaagcacattcctttgaaagaaaccgaagattgttatctttggcaatcctgattagatttcttcctcagacaacagtttattaagtttgtgctatgaatgtgggcaggtggtttgactcggtggagcaagtagtgggcactctagaattctttttctccaagtactcaaaggcctttggaagaatttcctctctgagcatttagatgttccttctactctgtgaggtgaaagtgtgttatgtggttttatttttcacttattgaatgccaattacatgccagccccagggttgtcttacatgtgttatcatatctcatttaatctgaaaaaggattatggcataggcacataatattatcttcatctttcagataaagaggcataagttcaggtaaatacatatcccagtagttacacagctagtgcctaatgatagcaggatttaccagatctgtctgcctttttcaaatataacaccttgcctgggaatgagctagcagaagacttttagaagatgagactggagaagtggcttcaaatttcattctaatcaagacactaagctttgcatttatttattccttcattaccatttattgggcacctaatgtgtgtcaaacaatctaggaattggcgacattacaatgaataaaaagcatagatccctgtcttccagaagtttacttctggttattggaggttttgagccaagaaatgacatgatctggcttagcttttacaaagaccctcctggctacagtgtgaagcatcacctgaagagaggtgagggcttcagcagcaagcccagttaggaggccactgcagcaatccagacaactgcggggcttggaccacagtagtggccaagatgagaatttggattttatatggacttagatggaaacaccaatgggattgctgaggaactgaatgtagaaattgcttgtccatgttttaactgcaactatggtcagcctgcatcctaaacctatgctttttaagttatgttaacatgctgaagtacaaagtgacttcacaactatattcaatttcatgaaaaactgtagctcctccttttcagctccttaggcttaggaaaggagagtgcctcttggagcctggaagaggcaggagagagctctgtgtcccagaagcatttgtcatccaggctgcagttagccagctggctccttcaaaagccacacacctgggtggcagcacatatgtggttatacctgagatatgtggtgtgtccatctcagagccactcaaagtccattttaacccttccctatggctccccatgaggaggtgggaaaacgaatcctcttaataagatttaagcacagcttcacatttttctgtctttgttatttctcagaaatgccattatcagtctgagtcagaacagatattaattcttggtcacaaagtagcacttttggcatactctcaccatttttttaacttcagaaacagcttccttgtaggtaactttcactgagctgacattgtcagccaaaaatggttctggagccacttcatctgccataaaatttaataagtccaggatacaaatttgtgtatcacaagtcaataaaattgccaccaagctgtttgtgtagtaataaggtcaataaatgtcatcctcattcaattaattttcattgaccttaaggaaatgaccttctatttccaagtaggagaagaaattggccatggagaagcataactgttgcatctgcttttcagttattacattactgaagatagcatgggcatctagctatgcttgtatattcagactaaaaagtaatctacatggcttatcctgaagtagacccaaatgatttaattacaattaagatcattgaaagaccccacaatatgcttggggtcatcctaactgcatcttccagatatgatctaatatctcactgatcttggccatccattgggttctgctgggcaggatatcaagttaaggatgtgatgagaggctctcactttctggcctgcaaactgcatttgtcacaacccctttctccattaacctggcctggagatcagccctgaagttgctcctttgctgtgctggccataccctgaaggagacaaccacaccagtgagagttgaatgcctctgatttcctccttcctccacaaggcagatgagggaccctgccatttttttataaaattcaaaatcaactaaagtatcacttttttattttattattttcccagggctgcgtccaaagaggactctgcggctggtgctctggactgcagaagaacaaggtggagttggtgccttccagtattatcagttacacaaggtaaaaacccagctgtggattgctaagcatttgtacatgtaatatacaaaaatccctctcattgtccatttaagacttcaataatactttctggtcaactggccctaggaaacacccttgtatgagccttctccctccagccctgtgaatgagaatgcactggtaaaccaatgatgctgtggtgtagagctgagggcttttcttcttctacaccacagtctgaggccaaagaaaaattccaattgccatgctgccatttttttcaagtctacctagttctgctgtattcatgtatgtcagagaaatagttataggcaaacattccctctccccaccgagcctatccccatacctcaatgcccgccatattcccagaagccttggcatttgagagccaggttccaagtcattgagtctgccaagagcattgccatgatggtggtggaaatggcagcagccacaggcctctgtcccaggaatgtggaggacagcttggtttgacaccagctgtcattacacaagtgtgaagcttgaagcaggaaggttattgtggatggtcatgattagaaatacaagaccacatggaagagaggggatagggagattaatatcaagagcaaattttgagacagcaaaatatacaagctgagaaatactctagatcaagtcaaatgttagttcaaagaggaactccaaaatcaacgcgcatatgctggcaagcagtgatggttgcccagagaggagcatttggtctgctgctgctgctggatggtttcccctgaatgtccagatgagaagaagcagatcttgcaagcttaaattatccaaatcggagaagggtttcttttgtgaattgtgtgtatgttatttttgaccttttttttttttcaaagtcagtctctattaccctatttcagtcagttagagtataatgagttcaaagtcatgaatttggtcactgaatacaattatttactgtacaaaggacaacttatgacctatgccctactctttcaccactttagttcttttggcctcaggtgatcctggggataacataattcaagacaagtgtcctttggttggtaggtcagtaacatcattttctatgtgttgtggtagaccacaacatcatataagggttgttctagattcagcaacattcaattaatattttctgaacatgtactatgttccatacactatgttatgcattaatgttagcatcaaaaagatctaccctgaccttacaaagcctacattctaaaggacactgacgattaacttgaattataaggtgttaagtctttctgggaaagaaattacatctaagctgagacctgaagactgagtggaagtaagctaaggaaaatggagagggagggaggaggtgggtactgcaccttggcagagggacctgtgtgtgcaaaggcaggagatgagacagaggaaagcacaccagagaaatggaaaggaattcagagtggctgctgcatagaatgcaagatgcacagtggtaggagggtggaacagagacgtaaacaagagcctgaacaagaagaacatatgaatcatatttagacgtgcggactttatcctcgaggcaagagagtaacttatttttaagaagaagctctaaaattctatacatattggactttatataaaaaaaagaatagttaaaagaactattcttttttttttttttttgagatggagtctcactttgttgcccaggctggagtggagtggcaccatcttggctcactgcaacctccgcctcctgggttcaagtgattctcctgcctcagcctcccaagtagctgggactccaggcgtgtgccaccacgcccagctaattttttgtacttttagtggagatggggtttcaccgtgttagccaggacagtctcgatctcctgaccttgtgatctgcccgcctcggcctcccaaagtgctgggattacaggtgtgagccaccgtgccctcttttattctcagtaatacactctactccaagaaaaatattggatttaaattgcaattgatctggctaaaaattttatcatcactgaaattcctagaatgtgaaaaaagaaggtttatttttctgtaatgtgagtttcactgtagcctatcaaagcacatggatgaaatcggaaatgcctaaaattctgaggttggcagaaatacacacactcaaaggacatgcaatcacataaacagaactactttatcttgacagcatccaggctgcctccatacaaatgtagcttcatgttggtggctagtctgcattgcattttcagagatagaaagaagaaattccagaaagggaaaacattggcattttgttttacagtaactctttacctcgcctttaaaaagacattgtgcatgctttacatgatacagccaatttcaaaggacttattctggattcttatgattagcatattgatattgacattactaagactataatcatttcaaaagtggctgagtttaacttaaaagttaatataataagcaagtcacaaaccacaagggtaaattagattgtctttagacttctctgtggcattactgaatgccagcagacagtccaacaatatccagttcactccagtcacaacagagagatcatctgttccaaataaggttatgctaactgctgaaacaaataataggtcaaatttcaatgacctaacataacccagaaatatattccttgctcacttaacatccaatctacagtagggctctgctttatacaggtattcagtgatccaagctgacataccctttaaaaacatggctttaatatgcctttgagtattgacatccagctggcaggcagggggatagtaggaggtttttatgggacagttctagaagtggctgacgtcatttctactcacactccattggcaagaactagtcatgtagtccaactgtgtgagaggctagggcatacaggcactggctgagcagccacttcccaacaacagctctatactgtaggctgggagcattctatagctatattctctatctttggcagaaagctgacccactctagggtcttcctttcacttcgttctggctttctaaacactttagctgcacaagaggccaactgccctgaggtctttacctcccatggtgctcaaagttgagatcagctctgtgagctgcctaaaagtactcatcttcaccactaccaggatgcctttgtctagcaacacacaaaaagaaaaggagtcacagtctttgaccagaaggaccttacattttacttcaaaaataactttaaatgcacacataagaaagttagtataacaaaccatatataatgaagttttaaataatgtactaaaagtattttatttttatggatgatgctatcattgacaaagtgccaaatggtgtaaaggctgaacagagtaaatggaaaggatttagaaaagggagaaatcactatggcatgttagtcgtgaggaaggaggcaacacctaatccttgcagagcaagtggatttcagccagtgatcaagaggggagagaagggacagcagctcccctttagatggatgataatggagtctcgaggtctgcctttggcattggtgtgggtgataccaaataagaacagaacttttatggcgggggtggggagatctattttagtgattgtagaaataaaaggtgtgaactttttaaatgactctgctaacatttttatgatacagttatggttattagtgatctatgtcaggaatcagaaaattatagctgatggaccaaatccagcctgccacttgtttatgtacagacttcaagctaagaagttttttcatatgtttagctgattatgctacagagattgtatgtggcccacaaaacttaaaatattaactatctgggtctttacagaaaaagcttacctacttctggtctataatgataaaagtcataaaatatcatcacattatttgtatacaatgatctctttctcgtttgtatgacctaaaatataattttgtaaattttgtttcgagcctaatattagcctatgtaagtatattgtaggaagatattattgtaatgataaaagcttgcatgcacaatctttttttttttttgcattcttatctggcagtctttaataataaagttggctaaacctacatggcactagctagggagaaaaacaatacgtagattattatttcttctttttgtttttctgaatgtaacattctttcttccccctcacaaagtcttttcaacagcgaaagttctacaaaggctattttaataataaatcagtttgtggaataatgaattattaatattcattatcctttccttagtaaatatatctttgtttacactgtactctaattaatatatgcagaaaatataaaatagttattttaaattgtgggtaaaatgtattgctgaactaattttcaaaattgtagttggattaaaagctacctttacttcataattatgctttcttatgacatatcagctcaattattataatacgtgctagaatttactaaatttactaaacaatttattaaattataaaggatgtgaggctatttatagcttgtgtatacattttgaaattcatatgcaactttattataatgtctaaaacacttcaaggaaacaaactttggcaaaaatggtctataagcattttagtagcagttactaagtaaataactcaaacaggaagtgttgaatatctcactgtagtactatacactagaatataaatcattcctgagatccattcagcatgcctctaacagttcatagcggaaagtcccataaaagatttctcttcttaagaaaatgcaagttcacatgtttcaataagttgttaaattttctctccttattttaaagtccttttcaccatgtctttgattgtcttggtattagcacataagcttgagaatgacttatatggacagtatattgtttgtgctttatttagaagcttcttttagaagcaactcatttttcttgctgttttattgaagtttaattagcatttggtaaatgcacatatcttaagtacacagcaaaataaatttggaaaatgtatacccctatgtaatcatcccccagatcaaggtatatagcattcctattaccctagtaagtttccttatgtccccttcaaatcaacttctgactctaccaaagacaactactatgctcctttgtaactccagattggttatgtctgttcttaaacttcatataaatggaaccatacagtacataatcctgagtctgacgtctttcactaaacagtatggttttgcagtttatccatgttgttgcattaacagtagtttgtccctttctattttttttttttttttcgagatggagtcgtgctctgtcccccaggctggaatgcagtgtggcacgatctcagctcactgcaacctccgcctcccgggttcaagcgattcttctgcctcagcctcccaagtagctgagactacaggcgtgtgccaccacacccggctaatttttgtatttttagtagagacagggtttcaccatgttggtcaagatggtctcgatctctcgacctcgtgatccacctgcctcggcctcctaaagtgctgggattacaggtgtgagccaccacgcccagccatccctttctattactgggtagttttctattgtgtgaatataccacagtctctttattctccagaacgaatgaagcaagaatattctgttgatggacatgtgagttgtttccagttttagctattataaatgaagttaccatgaacatttatgtacaaatctctgggtggacctatgcatttattttcttttctgggagtataattgctgggtcatatgataggtgatgtttaactttaccagaaactgctgaagaggtgggaagttgtaccattttacatttccaccaacaacatgtgggagtcctagttgctccctatctttcccagtatgtggtatcattagcctttttatttttagccattcttataggtgttatgtgtttatatttttcaaagtacagttctgaagagttacaagaaaaatcctgactcctctcctaatggccactattcttttgccctccctgcttcttcttgccttaagactttttgtttgtttgtttgtttgtattgttttgttttcttttgtatttgagacagagtctcgctctgtcgcccaggctggagtgcagtggcgcgatctcggctcactgcaacctccgcctccagggttcacgccattctcctgccttagcctcctgagtagctgggactacaggcgcccgccaccacacccggctaattttttgtatttttagtagagaccgggtttcaccgtgttagccaagatggtctctatctcctgacctcatgatccgcccaccacggcctcccaaagtgctgggattacaggcgtgagccaccatgcccggccgccttaagactatcttcatttcggtgttctgctttatgatttcagggagaccaaaggcctttttaccctgcatgaggtttgtggggctgttcatggttggagggaccttatttcaatttagagaaacatcttggcaagaggaggacatagaaatgccgtcctgctcataaccacggccgactcccaagaacacatgggggctgttgaaactcaactggagcccaaaggggaggacgattccctcaaagggcatgaggaggaagatttctcttttatgcccagaaaagaggttattctagggagaggggaaaagtccagaaaatgcctttatgttattctttattgataaattacattttttaaaaatatgaactctattggttaaatttaactggcattcacttaaaaggaaactttaccacatagagaagcatgttattgcactctagtgaataagagtttcattataggagtggaatttgactttgaaatttgaaaatatagatgagtttattgaattttcaaatcagtgaataaagtgagggttgtccaggtaccatttgcctaatctgcttttcatgggaataatgttgctgtcttctcttctcttctcttggaaggagaacaggatgtcatttctcatgtcctgaaatggacaaaggagaaaaaacatacctagcttcaactggatttctggcatttgttaatcttttccattttaaggaaaaatatgatctggcataattataatgagtaaggtaatctggccttgagaaagcctcattacacaaggtaatcaaataaaatagattgatatgtcttattctggcatgaaaaatattttaaccttttcctgatttattgcacaaacttctggcaattgaattacagggataatgaacactgttgtgttctggtagtcattaataagggcaatattttaaataggctttattaaatgagggatgggatgtatggtcattccaaatacacgaatttatctgaactctagccaactctaaaactgaaaaagcaaaattgaatattttgtcacaatttcctgttttgtcatactgaggaacaaaaattcctctttatgtatagaaatacactaaagtgttagcttcttttagcagtgaagttcttgccagcttcccaacctgcattaggtttcatgtttcactctaaaataaaagaatatgttagaaatgcttttgagacttcttcgtgctatctgggcaaatgtgtttctttggcatttttattttactaactctatttcctctatatgatgctaatttagatagagtgacactgctagagtaagggtattatactcatgttgagctctggttatacaaataatagagctgatgtactcattcagcataattgtgtccggactatgtctccagcacagcctttcttatatctttaatgttctgtgcagtatagacgtactaatcagaggtgattgtctcaatcattactgctgggcctttatgcatcctgtatttttctttcagtgcctagatattgcattagtctctcaagcacatcacaaaactggtttaaatttcatttgtctcagtgttttcttggtctggagcctttgtagttcctatattcacatgatttatactgcacacctgggagctcttaagggtcttattagaatttgtggattttatttttgtaaaaaaaggaaaggattgtcttttgagtttgctttctcctgtgtagaattccattatgactaggggacttctgaatcttatgtacatatggtaattatatatcaatgtatgccagtctaggcagagctatcaaaatatcccctttgatactaggagaatcatataccaccttgcgaataaacatgagtaggtttcaactcatctctttgctttatcgctctttagaagggatccttcttaactggcttttattatatttttctatataagagaaaacagtttaaagtaaaaagactatgacaactagaatggaattttttcatgtttctgggagagcaagaccttgcctaccattctgagataattttgtttaattcaatgccttatggtttcagattatagtgaagtttgacttgagtgttggttttagcccagtacctttaaagaaaagagaaatatcccaacttttctgctaccattactaacctaagtaaaacaattgccttttaaagttactcctaagaatgttgtgccaaaactttgaggtttcttgtcaattatttggctggcatttattctcccctcctgaaaccgtgaagaatggcttcagcttgtatctagtctgttttaccagcttacaggagagtgccttctggcacaaatagtttctgcctcagtgcctccctactcctaaccaggtcatgacctgacccagaaggacccataggatatctagtgcatgaacttcctgaggaaatcaagttggcacaccaggatgcacaaatctgaactgaggcatcatgccttgggctcacaagtgaactgcatgggtcagaggctttgggactaaattatctcattacatgtactggggccttactaagttacagagtcagcaaaccacttttcaatcaccagcactattttatttggcctgaagttgtcttctgcccttttgttttctaaatcaggggttggcaaactttttttttttaacagtccagataggaaagattttaggactgcaggtcatatggtttctctactcaactctcattgtaggcagtcatgggcaaaactagacaaatgagtatggctgtattccaaaaaaaccgtatttacaaaaaaaaaaaaaaaaaaaaaaaagaataaaggcaggtcagatagtttactgacgcctgttctaaactgttacaaggcagaagtttagaaaactttcttctgaagccttttcttatatcacggtcacagcttttagtgaaagagatttgtagcacatagtggaattctaacgtttagagattatgtcttggtaggctaataataggactgttggtaagcttagcatttacaaggttgcagttgtttccctgtaggtatttggccaacagaggccaacagaacacaccatcaccagatcagtctagtgccttacttatatcccactgagccacacaacaggcataattaccttgttggaggaagaagttaatgtacttcccgagtatttctaaaagcaagaacagaaccctttataaagatagctaaatgtgtactggaaaatatattttaaaggatatctattttaaatgtttacacatatagaagggtcttttagagaaatgaacattccaatacattttggcaatttcactgtttaaccacatcctagttttgtccattggtttgcttacactatttcttttttattttttttaatatttcctttcctttttaatattaaacaattgtgattcttttttttttgagtgacttcttttattattattattattatactttaagtttagggtacatgtgcacaatgtgcaggttagttacatatgtacacatgtgccatgctggtgtgctgcacccattaactcgtcatttagcattaggtatatctcctaatgctatccctccccactccccccaccccacaacagtccccagagtgtgatgttccccttcctgtgtccatgtgttctcattgttcaattcccacctatgagtaagaacatgtggtgtttggttttttgtccttgcgatagtttactgagaatgatgatttccagcttcatccatgtccctacaaaggacatgaactcatcatttttatggctgcatagtattccatggtgtatatgtgccacattttcttaatccagtctatcattgttggacatttgggttggttccaagtctttgctattgtgaatagtgccacaataaacatacatgtgcatgtgtctttatagcagcatgatttgtagtcctttgggtatatacccagtaatgggatggctgggtcaaatggtatttctagttctagatccctgaggaatcgccacactgacttccacaatggttgaactagtttacagtcccaccaacagtgtaaaagtgttcctatttctccacatcctctccagcacctgttgtttcctgactttttaatgattgccattctaactggtgtgagatggtatctcattgtggttttgatttgcatttctctgatggccactgatggtgagcattttttcatgtgtctgttttctgcataaatgtcttcttttgagaagtgtctgttcatgtccttcgcccactttttgatggggttgtttgtttttttcttgtaaatttgttggagttcattgtagattctggatattagccctttgtcagatgagtaggttgtgaaaattttctcccattttgtaggttgcctgttcactctgatggtagtttcttttgctgtgcagaagctctttagtttaattagatcctatttgtcaattttggcttttgttgccatcgcttttggtgttttagacatgaaggccttgcccatgcctatgtcctgaatggtaatgcctaggttttcttctagggttgttatggttttagttctaacgtttaagtctttaatccatcttgaattaatttttgtataaggtgtaaggaaaggatccagtttcagctttctacatatggctagccagttttcccagcaccatttattaaatagggaatcctttccccattgcttgtttttctcaggtttgtcaaagatcagatagttgaagatacgtggcattatttctgagggctctgttctgttccattgatctatatctctgttttggtaccagtaccatgctgtttgggttactgtagccttgtagtatagtttgaagtcaggtagtgtgatgcctccagctttgttcttttggcttaggattgacttggtgatgcgggctcttttttggttccatatgaactttaaagtagttttttccaattctgtgaagaaagtcattggtagcttgatggggatggcattgaatctataaattgccttgggcagtatggacattttcatgatattgattcttcctacccatgagcatgggatgttcttccatttctttgtatcctcttttatttcattgagcaggggtttgtagttctccttgaagaggtccttcacatcccttgtaagttggattcctaggtattttattctctttaaagcaattgtgaatgggagttcactcatgatttggctctctgtttgtctgttattggtgtataagaatgcttgtgatttttgtacattgattttgtatcctgagactttgctgaagttgcttatcagcttaaggagattttgggctgagacaatggggttttctagatatacaatcatatcacctgcaaacagggacaatttgacttcctcttttcctaattgaataccctttattttcttcccctgtctaattgccctggccagaacttccaacactatgctgaataggagtggtgagagagggcatccctgtcttgtgccagttttcaaagggaatgcttccagtttttgcccattcagtatgatattggctgtgggtttgtcatagattgctcttattattttgagttacgtcccctcaatacctaatttattgagagtttttagcatggagggttgttgaattttgtcaaaggccttttctgcgtctattgagataatcatgtggtttttgtctttggttctgtttatatgctggattacatttatagatttgcgtatattgaaccagccttgcatcccagggatgaagcccacttgatcatggtggataagctttttgatgtgctgctggattcagtttgccagtattttattgaggatttttgcatcaatgttcatcaaggatattagtctaaaattctcttttttggatgtgtctctgccaggctttggtatcaggatgatgctggcctcataaaatgagttagggaggattccctctttttctattgattggaatagtttcagaaggaatggtaccagttcctccttgtacctctggtagaattcagctgtgaatccatctggtcctggactctttttggttggtaagctattgattactgccacaatttcagagcctgttattggtctattcagagattcaacttcttcctggtttagtcttgggagggtgtatgtgtcgaggaatttatccatttcttctagattttctagtttatttgcgtaaaggtgtttgtagtattctctgatggtagtttgtatttctgtgggatcggtggtgatatcccctttatcattttttattgtgtctatttgattcttctctcttttcttctttattagtcttgctagcagtctatcaattttgttgatcctttcaaaaaaccagctcctggattcattaattttttgaagggttttttgtgtctctatttccttcagttctcctccgattttagttatttcttgccttctgctagcttttgaatgtgtttgctcttgcttttctagttcttttaattgtgatgttagggtgtcaattttggatctttcctgctttctcttgtgggcatttagtgctataaatttccctctacacactgctttggatgtgtcccagagattctggtatgttgtgtctttgttctcgttggtttcaaagaacatctttatttctgccttcatttcgttatgtacccagtagtcattcaggagcaggttgttcagtttccatgtagttgagcggttttgagtgagtttcttaatcctgagttccagtttgattgcactgtggtctgagagacagtttgttataatttctgttcttttacatttgctgaggagagctttacttccaactatgtggtcaatttttgaatcggtgtggtgtggtgctgaaaaaaatgtatattctgttgatttggggtggagagttctgtagatgtctattaggtccgcttggtgcagagctgagttcaattcctgggtatccttgttaactttctgtctcgttgatctgtctaatgttgacagtggggtgttaaagtctcccattattaatgtgtgggagtctaagtctctttgtaagtcactcagggcttgctttatgaatctgggtgctcctgtattgggtgcatatatatttaggatagttagctcttcctgttgaattgatccctttaccattatgtaatggccttctttgtctcttttgatctttgttggtttaaagtctgttttatcagagactaggattgcaacccctgcctttttttgttttccatttgcttggtagatcttcctccatccttttattttgagcctatgtgtgtctctgcacgtgagatgggtttcctgaatacagcacactgatgggtcttgactctttatccagtttgccagtctgtgtcttttaattggagaatttagtccatttacatttaaagataatattgttatgtgtcaatttgatcctgtcattatgatgttagctggttattttgatcgttagttgatgcagtttcttcctagcctcgatggtctttacaatttggcatgattttgcagtggctgctaccggttgttcctttccatgtttagtgcttccttcaggagctcttttagggcaggcctggtggtgacaaaatctctcatttgcttgtctgtaaagtattttatttctccttaacttatgaagcttagtttggctggatatgaaattctggtttgaaaattctttcctttaagaatgttgaatattggcccccactctcttctggcttgtagagtttctgccgagagatccgctgttagtcttatgggcttccctttgtgggtaacccgacctttctctctggctgcccttaacattttttccttcatttcaactttggtgaatttgacaattatatgtcttggagttgctcttctcaaggagtatctttgtggcgttctctatatttcctgaatctgaatgttggcctgccttgctagattggggaagttctcctggataatatcctgcagagtgttttccaacttggttccattctgcctgtcactttcaggtacaccaatcagacgtagatttggtcttttcacatagtcccctatttcttggaggctttgtttgtttctttttattcttttttctctaaaaatcccttctcgcttcatttcattcatttcatcttccatcactgataccctttcttccagttgattgcatcggctcctgaggcttctgcattcttcacgtagttcttgagccttggctttcagctccatcagctcctttaagcacttctctgtattggtcattctagttatacattcgtctaaatttttttcaaagtttttagcttctttgcctttggtttgaatttcctcctgtagctcggagtagtttgattgtctgaagccttcttctctcaacttgtcaaagtcattctccatccagctttgttccgttgctggtgaggaactgccttcctttggaggacgagaggtgctttgctttttagagtttccagtttttctgctctgttttttccccatctttgtggttttatctacttttgttctttgatgatggtgatgtacagatgggtttttggtgtggatgtcctttctgtttgttagttttccttctaacagacaggaccctcagctgcaggtctgttggagtttgctagaggtccactcccgaccctgtttgcctgggtatcagcagcggtggctgcagaacagcggattttcgtgaactgcgaatgctgctgtctgatccttcctctggaatttttgtctcagaggagtacccggctgtgtgaggtgtcagtctgcccctactggggggtgcctcccagttaggctgctggggggtcaggggtcagggacccacttgaggaggcagtctgcccattctcagatctccagctgcgtgctgggagaaccactgctctcttcaaagctgtcagacagggacatttaagtctgcagaggttactgctgtctttttgtttgtctgtgccctgcccccagaggtggagcctacagaggcaggcagggctccttgagctgtggtgggctccacccagttcgagcttcccggctgctttttttacctaagcaagcctgggcaatggtgggcgcccctcccccagcctcgctgccgccttgcagtttgatctcagactgctgtgctagcaatcagtgagactccgtgggcatagtaccttccaagccatgtgcgggatataatctcctggtgcgccattttttaagcccgtcggaaaagcgcagcattagagtgggagtgacccgattttccaggtgccgtctgtcacccctttctttgactaggaaagggaactccctgaccccttgtgcttcccgagtgaggcaatgcctcgccctccttcagctcgcgcacgacgcactgcacccactgtcctgcgcccactgtctggcactccctagtgagatgaacctggtacctcagatggaaatgcagaaatcacctgtcttctgcgtcgctcatgctgggagctgtagaccagagctgttcctattcagccatcttggctcagtatttcttttttaaacctgaattattttctgggagagaggctcttcccaagtgacccaaagatcattaggtctttgggtattcagtagcccttctggaagttcatcttctacttctggttactgtgattttctgtgcttccacgacactaacacgtaaacatcaaagagtggtctctctaagacagcttgaggagtgcacgagcagaagtactggcagggctgttcataaagccaatgccagaaagcagctcctcgctggcacatccactttgtactttgagacgcagtatccagaagccaggatgggcaatacccaaactatgttactttaagggctgaagatcaggcagggaactgagccccagaattgttagacattgttgtgagtgcaaagtgagcacttttgtctttctttctgctactcatcttacttgatcattcctgagtatattaaccaaatcctgtggtgtcttaaagataccatgtgtgccctgagaggctggtctcggtctagctttctgatttccttatcaattgggtcacatctgtattttctgctgactcacttatgtgtgtaaaaaacacaaaggcatacttttttttttcctaagcagatcggaacttctattccttttttttttttccagaagacctctctcgtgtactctcatcaaatgcttgtcctacatttgtaattattcattctagaagctgaggttgcccctagcaaccagcagttttgtctaaactgttttggtttcagggttgtcttaaaggagagtttctcaaaatccatttccaaagagcttttataccccacacagcaaaacatgtataaacaacaattcaaatttagggagcttaacaaggcctttcaacaaaggtttaaagtggtttcatcatatgatttatttaagattaaacagaatttctgttactagttaaaacgggagtgtaatttgcttttatggattcctatagtttcatttaataaaactcatccaatcagatgcactccctcccctgtgaaatcagaggcagtgccatatttgtaaatgtgtttcaggcaactctccaggtagtaactgagggctggaagaacgtacagcatccacctgccctcactgccatagctggcagtgttttttcccctccaaagctctggaaaatactttattataactcacagagccaaatgagaggcaatcaaactgttttgtcatttgaattaggaaaggtcaaagggaaaggaacataatagtagacagacagaaaagtgctttgtgaaaattacccattttttccacgtaaggaaaagtaatttgttttttttcagtgctagagatttttgttttgatagatttacagagagaaaagaaaccaccaagaattttgaaaggtcccatttcccaaacaaatatgtaacaagttcttaccatttaaaagatggcattataatctcttgcatctatgtgatcatttataaattacgctttcgtggacatcaagtcattgatgatagtaatgaccctggtggttgccagaccatgtactgttttccttatttcacacatgaagaaacagaggctcaaagaagtgaagaatgtacccaagtttgcatagcacagcccataaggtgcagagcctgaacttggacttcagccatgacttctatgaccacatacttctctgtcaccatcttaaatgtagatatctactaatttgtcataaactgaaggacatacatagcagcatatttaggaatgctggataatcagtaacatataaatagatgaaaggagaagttgcttcaaggtgcttagtttaaaacacatatagcatggtatcaattctatacaatggccaaaggatattgtgtaaccatgcagacatcagttgtcactagtaattctcaatgttttatattcacactttcttggtataaaaataaatatttgtatttgttcacgaagttaattctataaatcctgctacaatgagttttaaaaaaataaccaacaacacttcacttcagtcatctgtgtaattttcctttagtttggggcattttctaggtaaagttttagctaaacaatacagaaaaattaaaaagttcagagatcttttaatgatatgaaaaactgtttctaataataataaatgttaaaatcatttcactattcaaaagactgcgttcagagcggaggcaccctaacatactactctaggacatttctcactgccttcatcttcaaataaaagtgagaatagaaccctaacctttgagagatggaaataatgcatgtatatgtctgtttttatatctttcccatgtgtatagagcttagacactctatatgtgaagaccctccaaaaatcaagtctggctttcttctttcaggataaccattcccgaaacaccaaggacagggatacatcagaatggacccctacctgtgctatatttaaagatctccaaggatagagattttacgtatgtcagtattttttaacactatcagacaatgagaatattcctggccaggtccacttagtgatttcttcattgaaggatacaatttagaagattggaggagcaattataaaagaaagtaatacaatttagaagattgggggagcaattataaaggaaagtagctgtaggtctccaaaagttaaagtcccttaatcccagttgccttagtagttcttgcatgaaagcactaaggaaggatcaatgactgggagatgggatgaattctgaattgcaaaagagacatttaaatattacttgcaaactaaactcaaagcacaaataatttaacactgttttgttttagtttctaaaaaagtggactctaattcattctttccttgttcaggagataaaactatttgtaacctttaacatgttcttttcttcacagttgagagctcagtttgttaatactttctttcccaaactgttttctgaatgtattggaaaactgcacctgccagaatggattggtgtttgttcttcttcaatgaaaggtggctgtgatcaggagctgccccttttagagagcttaagctgccaaagcctaatacaacagaggtggaacggaaaatgagaatgaaggacatattcaaaaatttaacaaattgttggtgcctcaggcatgaagcccattggtttccaaagaatttggcagaaagatttctatcttctcatcttgtaggcaattaccttaatatggcacacttttgtgatggctttcattgaaaggctctgtttaaacatctttttctgaatcaccaagataagaatggagcaaatgaagggaaaaaaaatattcacttgtacacaaagctgctaccttcaattctctgaaattgtagttaatgcctaattatactgacattcctattgtacaaaagtgttgagaatgcaaatataatttcccagctaattatttcattacatggaagtgacatgagtgaagtaataaattagcatcgtctttataagaaccagcaattctggactttataatattgaaattttcaagtggagtgaagtgcttttttcttatgactactctgattaggtgaaaaatgccttttaaatttatgtgtataatacacctccttccttcagcagatattttaccattaatataggacagtgatatttatgtgagtacattattactgagaaggagacccaaaggatgtcaaagggcagagctgccagctgcgacagtctggcttgtactgcttttcttaaatgtggttcaaagcaatcagattatgaattgcagtgaaataaacttacttttatttttaaaatacaaccaccattaacagctccccagttagaacaactgaatgtcaaataattgcattctcaaatttaaactagaaaatagtagagcttgaggaaggggagtggaaactcaatagtgacacattgagatgggttagaaggtattcagttctccatttctttgatttaaggatcgtcaattgttagtggtgcgattaaaattaatacaaattttcaggaaaaataaaactacattaaatgcacaggggtttttaaactgacaatatcatacagtgcccaacacttttgtttttagaatcaatccatgtctaaaataccttcaatccagagtctgcagatgtctctgaaccctttggtcattagcagtgaagcattggcattaaggtgccaggccactttgtgtcacccatgctccttgttttgacaaggtgctaaaggtgtacccttgtggttggcagcctattacaaggcatattgaacacgtttttcctctgtactttcaatttggccaagttttttacacttaatttttaattttaatatttctgtaagccatatagcttctcctgaaactctaagggagcttttggcaaattgcttagtacctgagtgggaggcctccatgattcatggctggctacaccagtctttgctcaccttgaacactctagagtctattctgaagatttggcgatttctattgtttttcattgttttgcctcacacatgaaaatcaatcttctgtgtacatcaaaatataatgaagaattttaatcaataattatggactgtaatttaaaatttaatgatctgtgttgataccagtgtaaataagtgaagtgtaaaatacattatccagggccctttctgtgtgatgaagtttgcatgtggacaaacaatgacaatgaatatatgaatacaatacaatgaatatgtttgtttatttgcctagaatttggtaactttcttatggaatgcatcaataacaagatacattccaatttccaaaatgctaaaaaaggagaatactgtgattcttacatttagggaaatatggtattttatcttttgaattttatactggcagaaacaggagatgcaaaaaatcagaaaaacaagccagacgtggtggtgcacatctgtaatcccagctacttgggaggctgaggcagaaggattgcgtgagcccagggtttgtgatcagcctgagcaacgtagcaagaccccatttcaaaaaaattagaaaaattgtgcttaagtagccttttggtcctgatttgcttgagagtccagcttgtacccattgtcctgacataatcattaatagaatcccttttcactctcaaaagtttcctggcctacatagcaacttaagtaatggttactctacttattagtcacttttgttggtaataacaatgcctcgagagaacagaatagcttggtatattatagcccttcaaataaatatattaaatttatataatcctcagaacaaccctattaaatagccctttctttttgatgaggatatgaagctcagtgagattaatggttgccagggtcatttagctattatgtgacagaaccagtactccaacccacaggtccagggcaaattaattccattgagtttaataataataacactatgaatgatcatcataatcaccattactaccttactaataaagctaccatttgcccaacagaggttcttgaccattgctgtgccacaggccactttggtaatctggtgaaacctatggacctcttttcaaataatatttttgaatgcataaaataaaatgcatagtattacaaggatatgaattttattaaaatatagttaccaaaaattttaagctaaatttgcaatatagttatatatgtggttttccaaatgaattaaacaagatcttgaaggattatttaattatgactatgatatcaaagtaatgatgaacataaagaatacttagagatttctgcaacaagtctaatgtgatatgaaaagatctatgatttctaccagcaacaaagtgacaggttttgctaatactactgaagtttgttgcttacattcataagtaaagaaaattctaaattttacatagaggttagtaaaaataaagatgtaattttttcccattcaagttcacagagctcatccaagtgtatcaacccccaagggaccccgattaggacttgctgccttggaataaacctgcaaaacaactattattcccattttacaaatgagtaaactgaggctcagagtaattaagtaacttgcctaatattatttaccttatggctgagaagtgcatcaaatggcattggcacttgtacatcacctccttttgctccccagtggcaagcactatagaggtgggtattgtagtgtccacccctctctgagactgacaaccttttcagcatggttgccctagtcacttgcacatcctttaaacaccaatgatgcccttgatggagaacacagatatccaaagagaaactggaggagaggtctgagtgtctgactaatgctttttattcaaccctccttgaggatttctagtgttcagtatcccgtcagtggtcctcacatggctccccagaatgatcattattcccgacatatttgctgctattttctaccatagctattttcctcttctacctttaggtgattattgctgctacttattactattctcagatgaaggaaattgtttttcttcacctcccttagttcaatacaggtacctatttggattttttcagtaattgctataattccttagcctctctttatctaaactatacccattaaattatgttaactcttctcaaagctaaattgcctcatctgtttattattttcctcatcttgcctgaatattttaaaacttacaaaatatgtgaagcgattgttaaaaatctaagtagtcccaggacacatttattagttactgtaattgagtcttactgattacacatgcattataagcctcatgatgtgctaactttagcacaacaaagatacagttttaaaatattatatatttaatattttttaaattctatgttgtcagttcagttactgttgctcatctccttctcctcctgagtaatggccaagttattttggtgagtctaacatatgggagtctcatctttgatagcaaaatgatgatgacatatagtctactgagaatatattcagccctgttttcacctgagaaggaggagattttgccacctagcctccaaaataagagcatcttattccattattgaagggacctttgaagtttcacttgtattttgataatttatggccacttcttaaaaaatcactatcactctatatatcctcctggaaagcatttgttttagcacttataatggatgttgtaaacatttgtatattattaagtgctttataacatacacagtaaagattcagctaataactttaattgtggaactgtaggttttcttgagaacatttttttaaaaaggaaaacagattctgaaaaactgatgttattttatcaccaacatgagtaaccacatcatcatcatcaacataatcattatcttcaccaccaccaccatcatccaaaatggcatctagttacatgctcgcatgggttcacatatacaaatatacacacatatgtgtttaaacacacacatacatgcatatatttattcattcagtcagcacatgtttactgagagcctactaagtgccaggcagtgttttgaggtctgccctcatcttgcttccattctagtgaatcaagactgataataaattggataaataagtaaaattgtatgttagatgaaaataactgctaaggagaaaaataaaacagggagcagagatagagtacatgaggagggggctgttttaatttttgatagaggggaacaaggcagactttatggaggtggtaatatttggttaagacctgaaaggatgaagaggagagccacgtggatacctggaggagagcattctagcgaagatggagagttgttccaaaggtgctgctggaggccatgcttgacattcaggggatagggaggaagccaatgtgcttgaaatggagcagtgaaaggaaagcagtaggacaagaagtcaatataaagaagcccaggcagagtcaagccccatgggccattttctctgagtgaggttggaactatgggaggcttttgagcataggagaaacatgatctgaatcaactttctaaaataatcattctggctgcttggttgagaacagactaaaggggaaccagaatggaagaaagataatagcctaggcaagacaagagtgtagtttggaacaagatgatagctgtggaaggcatagcaagttgtcaggctgcagataatattttaaggaaggagcgaacagaatctgatggtggattgcatatggagtatgagagaaatagaggagtcaagcataaactgacagtttggggcccaaacaactgaaatgaggggagttaggcagggggaaaagggggagataaggagtatgggtttgaacctgttaagtttgagatatcagactttcatgtggagaggtcaagtaggcagtttggtaaaaagtatagagttcaatgaattgacatttctcaaaagaagatatacaaatggccaacaaacatatgaaaaaatgttcaacatcactaatcatcagggaaatgcaaataaaaaccacaatgagataccaccttacccctgggagaatggccattattaaaaaatcagaaaacaatagatgttgtcgtggatgtggtgaaaagggaactcatacactgctggtgggaacgtaaattagtatagcctctatggaaaacagtatggagattcctcaaagaactaaaagtatatctaccattctatccagcaatcccactactaggtatctgcccaaaggaaaagaagtcattatatcaaaaagacacctgcacatgtacatttatcacagcatggttcacaattgcaaagatatggaataaacctaactgtccatcaatagataagtggataaagaaaatgtgttacatacataccacggaataccactcagccataaaagagtgaaataatatcttctgcagcaacttggatggaactggaggccattattctaagtgaagtaattcaggaatggaaaaccaaataccacatgtcctcacttataagttggagctaagccatgggtatgcaaagacaaacagggtggtataatggacactggagacttagaaagggggagaatggcaggtgaatgaaggatgaaaaactacctattgggtataatgtatactattcgggttacgggtgcactaaaatcccaggcttcactgctatacagtgcatccatgtgaccaaaaaaccactgtacccctaaagttattgaaataacaaaatgttttaagtatagagttcaggggggaagtctacagatagccataggcatggagttttcttcatataaatgctccatctgaatggaaaataatagttaccctctcacaacacccctgtccccctgtccaatggaagctcagcttctatgttttcaatgctgtgattgttggttttgctctccagggaatatagtgcccttagaggctctgtctcttcatcttgaagatcccctggtcctagggtctggattctccacaagcctcctttatcacatcatcatgatcctcactggaatcagtctctctgaactgttttcttcctcctcctgatgtctcactcccctctctcctttctccagggctattgttgccaccagttcctaaagccattggttgcaccacctttccttcaataagtcagctgatgtaattggatagagatggttttgtggctaactttttcagccttttgaggttcaagtccatattctgtagacaacttgaggcttctttagtcataaagccaaataaataataactcaactctcaccttcagattctccctgaccaagatcatttctcccattttctaaataggctgaaggaaggcaagggctgaaacggagacaggatgctactgcagtactccacgtgaaggctggtggtcgcttggactgagtcagaacagggaaactgatgggaagttgtcggagagtaagtctatgttgaaaatagagccaacaagatttgttgatagattgcattttgggtgtacaagcaagagaggagttccagaagaaaccaactctaccagcaccttgattttagccctgtaaggcttatttcagacttacaacctccagaactgttagagaataaatttttaggccgggcacagtggctcatgcctataatcctagcactttaggaggccaaagtgggtggatcacctgagcccaaaagttcaagaccagcctgggcaacctggcgagacttttcctctataaaaacacaaaaaaattagctgggcgtggtggtgcacctgtagtcccagctactcaggagactgaggtgggaggattgcttgagcctgggaagccaaagctgcagtgagccaagatcatgccactgcactccaggcttggtgacagagtgagaccctatctcaaaacacacacacacacacacacacacacacacaaattgtgttgttcaagtcagtgactttgtggtaatttgtgacagcagcaataggaaactaatacacaattagacatctaagtggaggtactgagtagctgtgggatatgagtgtagaattcaggagatgcatgaaaatatgaatttggaactcatcaccatacagatttatttaaaaccatgagcctaaataagggttccaacacagtaagtgtgatagagaaaagaagaggcctttagtctgtttctgagcaccccaatttctattggtcaggaggatgagaaaaccagccaagaaaaatgagaaggatcatccagtaaagcataaaaagagccaagagtctgaggttccagaagccaaggcaagaatgcatttccaggagtaaacaaatgtcaagtgcagctccatcacaggtttgaaatttggtgctcactaatggtttccactttaaattttttgctaatgcctacaaaaattctaggagggacaaccaatgtttgagagtgagatactctacagaacatgcttatatttatccttttagagattgcctaagctctgatcctctcttggaaagctacattctggacattagttggatgcttagaataaagtcatctgttcatttgacaagtattttcaagtgcccgttagctaggttctgagaatatgctgatgaactaacaagatccctgctctcatgggaacactttcagtctagggtatttgctgaggccaaacatcacctcttttatcaagcttttgccaacatttttcagtagttgctttcccttctttgtacatattcatagaactcatcacatttaatgtattagccagttattgcctctgctggtaaactctcccctcctttaggaaagcaaccctatcttagtcatcttcatatatagataccctcatatgtaggttggaaatatgatttattattaaaaccaggaaatgtctgcaagagaaaggaggctctgttaattaacaccaagacaggggatgtaaactgggacttcctagggcaaacaaaaatgtatagtcaccctatcactcaagtttacgtcaaaataactgttgaataaatacattttgcttcctgaaaaaacacatttactgaaatgtgacttaatattttgcttttggctttaattgaggatcaatatgtaagaaatagtgttaggaaaagtgtttctgcatcttttgtaaaactgttattggagactgtgtccattattttgtccagcgttcctcatataaagagccatgtaattactccccttagaactgagcgctagaaaaaaatattgcttttttcaaggagatggtggtgcactttctcttcctagataatgagagctcagtaatacatcaatcacgctctcacattggcagccacaagctagagctaaattatatcctcaagttgcttttaaggctgtgtcaaaatgttccaaattgtgacttttcctttgccttaaacatttattgttcacctactatgtgcttagttctgttatttaatctagagatatggcagagatccacacacgtgattcctgtgttcatggcattttcttggttctagcacatttacctactcttttagtacagtatttggacattttcttgtagagagccttaaatttttgcaggagcaaggcaggcatttaaaaaaaattgaatgaagtgcaataggccaacaaattagggaggggtatggacggtagtcacagaaggcttgggcagaagtagggcatgaagtcacttgagcagaccaaggagccctgaagttcatattttggtacttttgtttttcataaggtttcaaacctgctaattttcttttgaaaaagaagaaggaaaggcccgcctaagaaaatataattatttctaaagttgtggttagcatctttactaatatttgtaaagagtacttgatcaaataaggcatatggggatactgtcacaatccagaaatgctgaaagtgcttgtctgtaggctagagaaagaaaaacccacaaattgggttttaatatgatacaccctatacaccctaggattgagtaaatatttgggttctagagtatagcgtagtctatttttgcaggacaagaaaatgatgagtactatttttttaaaaaataacctgtctacttatgggtagatgaacttagcggtccattataaccttagaaagggacttgaagaagctgctgcagtcttcccaaccaagagaaggacattagaggtcaaccagaaagcactatcttggctggaacaacaatgccatcaaaaacaagaaacacatctttatgtgttggtttatttagcatgtcacagtgttaagggaaaatggtcaaatgaaggaaaggttcttcaggcaggcaatttagttgttaccttttgaacctggagaagaatagtagtgtggtgggtataacaggaaagactgacagataacctgttagaagaggggactgagagggatagagaatgaaaaaggcagggaagtctgctcctacaaacccagctatgttggcactttctcttctacaactgcatactgaaatgaacgtgaaaccagtagcatgaaacacttgaccaatacatagcattaaaggaatcaaaatttaattgtgagctcttgagtcccactacttctattattattatattgcttccacatgaaagaataaaattagaagctgaaatagatatcaatttgctatgtaagcctttttttaagtcatatctaccgaatatcctggatattgcattttttaaaaaagcatatcaaatgcagtcagatttgctatataatacaaataaaattactctttttagctaatgtttatgccacatttttagccttctggctcactgttatgaccgtagtgtcatttatgcagggttcgtgtgtttttggtaagcttaagagttatccacggaccttaacaagcacaagaggagaattcactaagatctagagtgcttcaaatgacattgcaaacattggactgcctgaaaacataggtttgtctcagaacagaatacctctgtgcacacacacagaatgataggtctggaaagggatctccagtggctactcattctgttcctgtctccaggtacgatggtggctaaaccatagtaggagtgcagtgacaagatggttagatccacagaggctcctgcatgtgttaggtttcccgctctgtctgcaattttggtactaatgtaacttacccaagactgcccatttccccaagctgcagccagttgagctatcaaataaaataatttatgttatcatccctttcctggctctcccttgggtgcccaaagctgttcaaaactgagtgctggagactgaaagtaaaggtcaaaaggaaaagtctgaacttcagggtagatctgaccagaaaataaaggctgtctttctaccttgcacagcagaggaaccttctttacctatcatccaatcatgttagttgtttgagctgaagctctgtaaagaaatcaccttcatccacagaaactgggaattccagggtcactggcagaactgcaaaacaggattgcagcaactcagcacacacattgtaagatgatttgcttttgagaacttgttttgagcctaccacctgaccaaacagcatcaccaccattatctgtaaaatatttacatttacagggcaagaaagagttactaaaattgattgccctgtgtcagtgtggagtttacttctttgaagaataaattgaggaggctacatgattaattcaaatagttaggagtctcttttctttccacttgatcttgagacttcaatgtcactttaagtcaaattcaaagacatgttgagaaacatgagaaaatacgtttatttcatttatttttccatggtggtctcataagttattttttctaggttatgagaagataaaaaacttttaaacaaagaagccaaatttggagagaaaggagctattattgaacttgggtctatgtttctgaaaagtagcctagaattttataaaagcaaaaaacaaaaacatcatccttgtgtttatattaggaagtattttaaaacatgcaatatgtattttaaacacttttcttttgaatcttgcgttgcacccaaagaatgctaatggtaaccaaattgttctttggcagagtagcctgacccttaaaaaaaggaacagaagtgttacagcatgtgattgtagcacaagacaattatgaatcctcaaccctgagcagatattaactaatcctatgatctgaccataagaggttaccttggagcattcctctacattgcattatgtatattacatggtaatgaatgacagttttcatggctcctaataatgagcagcttctctttatttagagaacaaaatagggggtttacagataatatctgagtttatcattgagctgctcagcctcctcttctatgtgcctcagcttgtctcaatcagtgctggttatctcagcaataaagcattcagcctctagaagttggtttcttcctacaccctataaacaagaggatgaatatcttgttacatgtgctaaaatgagttgggtgaaatgagcattactctgctccctgtcactagctataatcagcttttcaaatctatactgagtgtgtccccacacatagcacactaaggaataaggatgttcgtgacaatatattcctgagaagcagcagttctaacatcccagtgacagctattcattccagtttctttgtgcagagacattgtcccaactccttcaccatgtgctaacaattagataatgactccataaatgtagagaaaaagcagtgtcatggacggtgggtagtttgttttcttagttctttattgaaaacatatggagatgtttatatataaatagaaaacaataaaacgctgccatcatgtaagcagcaacttaaaaagttctacacgaatagaaatcaaacatttctatacctatgccagaattctggtttactgatatctacacatcctgtcttatttggcttgaaaagatgttttattattttaggctttttatttatagttggaagcaaattgtggagcaagagatttttgtttttgttttcatttctttcttggcttaaacaaattacttttttagcaggaacaacaacttctgtccaagtataccttgtgttatgatcatgaaaaaaagtttttaatgtatacatttaactacggtctttgtatttctgaattaaaagtgaggacttgtggcctgacagaagtgactttcaggagacccagcagtggagaggttgagagcactgcttaggaggtagaagcaattcctctgggttggaattctggctgcaccacttaactagctaggtaaccgtgggaaagttagtcaacctgactaaacctcagttacttcatctgtcagatgagaaatataagagcacttaaagaatgatcatgcacactcatgggatgagctgtaagacgttacacatagtgtctggctcgtaggaaacatcacagaaatgctgcctagcatcgttgtaatcagctaacagaagggcttatattgagaccatccttgaaaatctgagaagtgttgatgctcagtgccaagaacagtaacaacagtaatgctactgtttaccaagtgctagttatgccctagcctttacaatgtactgtttttgacaattccatgagctgggtaccattatcatccccattacagctaaagattggttgatgtgagggtcaaacccagtctggatcattcagaagcccacactcttgatctctctgctaaaatggctgccacatatatagcctagggcacctttgaaaccttctttatttacactattctctatgttcctgtcaacatcctgtgacattgcacaatggcattcacaaactgtgaagtcccctgtccctaggacatctgttcatttgtagttaaagaggaccaggaaacacttaatgaacacattattagaagccctggttttcaattcatgcaaccatttttgctttggtttaaaggccttttctttaaaggtgcttgaagcttcatatggacaggctcattattcaagcttttgtcccaacctacagatgcagaagccaaggaccaaagtaacatgacttggggacagagggagaggccattcacctgccttggtagcccagtgtatcagttgctgaatcaggaatacaacagactgagcccagggcagtgtccaactcatcaggctgctcattaatgttgggtctaacagccaaactgctaactagctccactttttaaaaacttctattttaagttcaggggtacatgtgcaggtttgttacatagggaaacttgcctcctgagagtttgttgtacagattattttctctcccaggtgttaagcctagtacccattagttatttttcctgatcttctccctccttccaccatccaccctctggtaggttccagtgtgtgttgttcctctctatctgtccatgtgttctcaccatttaactcccacttataagtgagaacatgtggtatttggttttccatttctgacttagtttgctaaggataatggcctccagctccatccatgtccctgcaaaggacatgatctcattatttttgtggttgcatagtatttcctggtatatatgtaccacatttcctttatccagtctatcactgatgagcatttaggttgattccatgtctctgttattgtgaatagtgctgcagtaaacatacacatgcatgtgtctttataatatagaatgatttctatttccccttaactggtatatacccagtaatgggcttgctgggttgaatggtaattctgtctctaggtctttgaggagtcgccacactgctttccacaatggttgaactaatttacactcccatcaacattgtataagtgttcccttttctcctcaacctcaccagcatgtactttttttagtttttaatagttgccattctgactggtgtgagatggtatctcattgtggttttgatttgcatttctctaatggtcagtaatattgagctttttttcatatgcttgttggccacacgtatgtcttcttttgagaagcctctgttcatgtcctttgcccactttttaatggggttgtttttctcttgtaaatttgtttaagttccttatagatgctgtatattagacctttgtcagatgcatagcttgcaaaacttttctcctgttctgcaggttgtctgtttactctgttgatagtttcttttgctgtacagaaactcttaattaggttccatctgtcaacttttgcttttgttgcgattgcttttggcatctttgtcatgaaaactttgctagttcctatgtccagaatggtatgcctaggttgtcttctgggtttttatagttttgggcttcacatttaagtctttaatcaatctttagttgatttttgtatggtgtaaagaaggggtcaagtttcaacttctgcatgtggctagtcagttatcccatcatcctttattaaatggggaaccgtttccccattgctttttttttgtcagctttgtcaaagatcagatatttgtaggtgttcagccttatttctgggctccctactctgttccattggtcttgtgtctatttttgtaccaataccatgctgttttgattaccgtaatcctgtagtataatttgaagttgggtaacgtgatgcctccagctttgttcttcttgcttaggattgccttggctatttgggctattttggggttccatatgaatttaaaatagtttttctagttctgtgaagaatgtcattggtagtttaataggaagagcattgaatctgtaaattgctttgggcagtatgaccattttaatgatattgattcttcctatcatgtagctccaattttaacctacacagtacatgactagaagcactttgcctgattttcttgttggaagaatgggatctgcctgcaatatggaaaccctcacaaacaagatgactcaattctgttttcatttgcaagatatattgtgaatgttcttttctcctttttgcaggagagggaaagggtttagggttgtgggtgtggcagggcatagaagggaagaggcttaggactgccaaattacatgtcaacctgctgacttagcatcagtgtactagttaaatgagccctgaatgtaagacattaatgcaaatattttgcatattattaactctaatgatgctaccataatgcagtatcctcagctgaaagctgaggtggcattttttattataaatgccctgggtctttcactgaaaatcaccatgaagacaagtcccttagaagtgagagcagaaatatgaacagagttctgcatcgttaaccttctcatcattaacaataacaaaaaatattggtgtcccagggccctgcattcagtaaatgccggcaacatctttctttagaaactatcactgctcttgcccttataactacaatatacttccaaagcaaaaggttaggcaatcattgtaaaatggaatctgttttagaaaaaaatactatgcaatccccaaattgttatgtaggtggaaaatcattctaaatgcagaacaagtattgcttaccctccagtgccatgctagtgatggtagtgtggagtcttggaaagcagagggtttcagagccagcgctaccatttgccagctgtatgacattgagcaaatcgcttgacctccctgattgtcagatcctttcctataaaacagcaacattaataatactgctttgtctattttatgagttgccaaagaacaccaaaggagattgcaaatgtgaaagctctctggacgcaatgtacaaatgttattattgattttttactaggtgagtaatgaggaatgagtagcagtgtttgtccaaggatagcttgggaataagtcaaccaaggtggcagttggtaggtcttgaagatgtggttggctcctgggaaacagatgagctggccagtttgaaggatcttaaagttgcaagttttcgggctgggtagcaatttaactgtgcaacctgtcaagagcctattatattctaaatttgtgccgtgacaatattggctacatgaaataactgtgtgctttcttaccagactttatttggaaagagtttatgaactagtggcctggcagcgttgcctggaattaacagtgctgtggttttacaccagggagagaagtgtttcatgccttgttctattacctccctccctggagattcaacagatggaacaacaacaaaatcagaaccccaagacaaacctgtcagcttgatgcctttaagcttcggcagaactcacaattaagataagatagaatatccatttagaggaaagaggtgcaaagaaataagttcacagagcataccttcttttgtctgagcatggctaatactatctggagatccctgccacataggaggaattgtatactggaacacagtgaacacttaagaaaattagttgaaagaatattattgctagtagaaataactgaacatctttaatatggggctttatatttcccttcattatatttttttaatcctttcaagccaactcttgagtttggcaaatcctaggctgagtaattgtgcatctcagaatggttagataatatgcagagcagaccttaagtcaggcacagcaacatgtgttttggcacagccgtaaggaggtaaagtatttggtaattgttgtttgatagttcccaaggagaaagcactgaagcaacagataagaaccaaacaattttctcttgtgtttaggtaaatatttccaactacagtctggtgatggagtctgacgcaggaaccttcttacccactgggctgcaattcactggcagtgaaaaggccagggccatcatggaggaggttatgagcctgctgcagcccctcaatatcactcaggtcctgagccatggagaagggacagacatcaacttttggatccaagctggagtgcctggtaagaccaaaagatgaagttgtgttccttatatattgccaacaatttaaaataaaatttctgttttaatagagcacaatgaatactagtaggccaggttgtccacggaaaccttaagcttttgttcaaggtataatctgatgatttctaaaactgggataatagtcctcaccttgtatttgtttacccatctgtatccctccactctttctaaattataagctcctcactcccagagattctgatttagtcattctggaattgggcctaaaaatccattgttttgttttgttttttaaggaggtatctttggtgattatagcacaaatgatctcataaccaaaatttgagaaatagagtagaaggcaaatattactactaatatccttctagttctagtcctgtgctagaaaaacttccttgatccaaataattccctattaaaacactgtggtatctgaaattttaccattagagatagattccttgagggtggggtactttcttttaatcatgttttaccttaatgcaaagactcctgtgcaagaggttgagcataaactaatttaccctgggcagtgatttatcatgtgaatatcctgaagagaagtcctaagtccctggggttcagggatgaaattatgaaatgggagcggacatgaggaggttacttacagaaatacaagctggaacagctggaacagtctttttttttttttttttttttttttttttagacagggtctcactctgtcacctgggctggagtgcagtgacatgatcacagctcactgtaacctccacctcctggccttaagcaatcttcctgtctcagcctcccgagtagctgggattatgagtgtgcaccaccatgcctggctaacttttgtattttttacagagacagagtttcgccatgttgcccaggctggtctccaactcctgggctcaagtgatctgcctgccttggcttcccaaaatgctgggattataggcatgagcgaccatgcctggcctctagaacagtcttaaagaagacaaatgtatactacttcacaaagttacctaagcctggccattgaaaaagtttactgatattgtttgtgacccgaggttgcttcctcaacaccattatatccataatccaaaaaagttaaaggatccatctgcaaattgttctgtatttgtactatacacataggatgcctaacatttgaacagttttaacattgctgtattcagaaatatttctgtggctacaaacatttcagaggtactaaaacagtgtctctggacctactccactccagatttttttttccaggctgcaaagtagattttaccaatagtaacatactacatagatttaagatttttaaaaagcttattcttgcaatactgcagatttttaaggcatattttaagttttaaggtttataataatctttcataactaaaaataaaaggagcttttctgtactctaatagaaagaccaaaattattttcctttgttctttgttctgtgtatgttaacatattttgaaatctcttaaagcaacatttccatttacaatgctgtacttctctggacagatccaatactatctacatatgtgtcattgataaacatgatctaagtgtaggggagagagtctgccctttaaattatatagaatcatttgtatgaaattctagattttttctgagcctgaaatatttcaacaagaacttcttaaaaattgagaaaccctgaataagctgctgtgtggtagctgtgaggaaaagactggtagactgtgggtgaatgagagtgcagacggggggtggttcaaggtgaggtaaggagctgaaacctaagacagaattgggaacaaaaacttgtccctccccatcccaggtatttcttttttgttgtgtttgatcattgagacttggctctagcttttttccttcacatgtacgtgttgtataagaatggttctgtttggagtgatcaggttaatttgattcttttcacctaaaataagaaagcattttctgtctttgccatggtttaagatgaggtcagatttgatttctacctaatagaatggagtggggagactgagcccattatggttgtataagaattaataagaggccgggtgcagtggctcatgcctgtaatcccagcattttgggaggccgaggtgggtaaatcacttgaagtcaggggttcgagaccagcctgaccaacatggtgaaaccccagctctactaaaaaaatacaaagttagccggatgtggtggtgcaagcctgtaatcccagctaactgggaggctgaggcaggagaattgcttgaacccaggaggcggcagttgcagtgagctgagatcatgccactgcactccagcctgagctacaagagtgaaactccatctgaaaacaaacaaacaaacaaaaaagaattaataagagttaaaatgtgttgaactcctaatgtgtaggaagtacctaggctttttgcagacactgttttatccatacaaccatcctatgaaggaggtacaattatcatgatccctattttgcagatgaagaaacagactcataagggttaaatgacttgcccaagactatactgcccttagggcaggagtcaccctgagaacaggccattttggcttcaaggctggtggcccttttctcacaatatgcaacaacactgaggggtctggaatgctgagaagcctccaaatctccggcagtgtctaaaatgtttatcttactcagctcttgcttatgcaaaggatttcagtccattcctgctccacagtgatttacccctgggagaaaggagtttgttattgtaaataactacttatatcttctcacattctttgttctactcccttctttaactctgaaagatcagaaaggtttacataaagtcagtagctcatttagatgactctaaatgtttccttgaatgctgttttatttcctttagagcattagaagacagaaccaaattactgctgtcttccttttattacttttgagttatcctttgatatttcaaatttgggctattcctggaagaaacaatggtactggttataactcttgtcacctattgaaaatttcaggtacctcactgtgtgcagtggcttacccctgtaatcccagcactttgggaggctgcaaggtgggagaattgcttgaggccaggagtttaagatcagcctgggcaacacagcaagacccccatctgtctctaaaaaaaaaaaaaaaagaaaaggatgaagaaccatatttgggttcttcatcttttttctaaaagatgaaaatgaatttgtctgaaaaagaaaaaagtaaaaatatatcagttgtgtaccctatatttgtgaaggcctgacaaattatagcttaaagctaagggtaggattctaaatactaattaagttatcatttaaataactgctcacctaacttctaaaaaattaatgctaaataatatttctaaactccatccttttttctttctttttttctttcacggattcaataaacatttattgagtccctaccatgttctaggcctattaaatttctataatttgaggtgactgtatgatgactagaccccaatattccatgtatactatttaccaaaatactgatagaactgtatatctatcacacagatagaattaaaattcaacattgctttcattaattatagaagacaaaaggatcaatttataatacggccatctttgggagagaaaagatgatatcctttacccatctagatgatatctataatggacagaataactgtcaacattaatataaggctttggggaaaaaagattttctttaaaagtatcttggatgtactttccgcataaactctttgttctagatcttcagattccagccttctcccatgtccacctccttccatattcctattctttctctctaaatcctcagtgctctttaaggctcattctgtattcactggtgttcatgaatccttcctgagtccgtagtgctctattgcttttccaaatttctaacgcgcttcaagtctttgtcccacaacctggcatgtgaattacaaactatgatattgttcttggaacactaggggcttatgtgcatcctgctgcctatatgcagtgatcagttctttgaggttaaggtcaataatttctcattctttgcctgttccagagctgtcggtttaattttaggagacatttaaattcttataaatctgacttagcagaaacaaaaacattgaaataattattgtctagacaagcttttagatacttcagtttaagaatatgaagaaaataaaggatactaagagccaaaaatgtataaaaaatattgggagaatgatataaattgggaagcctagagcaataaggattatttctcttaaaggagcaaagactgagagaagatgtatctttcaatactttagtgattctcacacataaaatggtgaattgctcttccctgacaatttgaaagacaatacatgacttaaagtgacctaagagggatttaagctagtctctagtcactccagataatagagaggctttaaatctcaagtttttgcctgattctcctatatgagctccaggttaggatgaaaggagtctatttcattctgagtatgtcaccaatgaggtataatccatggttcttagatgtccctaagtgcatccttcttgaatatatttcttctttagaaactctttcacaaaatatacattaatgaaagaaaattaaataccctcttactgtgacctgagagaatgagcccactcttactctatatctgccaagaagagtttactcctctgcttcagaatctgaaattcaactttttgttgttgttgtttttagtgtggtggcttgtggtagacggtgtattgcaaggagttagaggacttgagtgtatattctgacttcaaaacttctaactatgtaggcaaacagtgtaatttttctaagcctcatttatttgttattaagcatccttattaatcaactattgtatggtactggagaatcagtagtaagaaaagacagataagatccatgctctcacagacaacacagactagtaatgagacctggttatttcatctgcaaaataagtctggtaacctatgagtcattatttctaccaggcctccacttgtgttctcctcctcctctgtcccctatctcattagcaggcactataattcagaaacctcaaaagcacccaggacataaagccaaatgtttacaagtcctgtttactccaaatccctgctatttcttaaacccattccctcctctccaccccacagaccttgtctcaccaaaactcactgattcctacagcagcctcctagtaatatcccaacctgtgtttttaatcttctttcacctaattggctcactgcttctagaatgaactttctaaagtgaaaatcagtatatcaacctggatgcttttggctgcaaaatgaaacagaagacccagtcagaatggcagtaaggggatgatgtttttaaattcgcttaaaaagaactttgcagcaggtgttacagagtgcataatttggccatttgaccacttcagggacgttggttctttacatctttccatgttgccattctcagcatgtagacttttgtcaggcctgtctctttgtggtcccaggatggctgcagttgctctaagcagcacattctcatacattgtgcagtagtggaagagagaatgtctgtaacagatatcccttttgaagagtgaggaaatgttttctagaagccctaaaacaagtttcttaaactccatattattggccaaaattgtgacatatgtctgtggctaaatcatgcagaggcgatagagtggaattacctagattggcttatactgatcaaattttacttcctaggcatagggtggggcccagtattcactgaaaaacaacttcttgagaagctgtttgagaaaaattgggattctttagggaaaagatgatgatatctattgggtaaataattaaaagtagctgcaatatctgatcatccctgctccttgcttccaatcctccagcatctccctgctgtctccagagtatgtatgaataaagtgttcaccaagtatggcattcaaggccccaaatctcagaaatcaccgctaaataacttactcatgtaaccaaacaccacctgttcctcaataacgtatggaaacaaacaaatgaaaacggtaatttaaaaaaaagaaatcggggcatccaaatcggtaaagaggaagtcaaactgtcgctgtttgctgatgatatgaccgtatacctagaaaaccctaaagactcctccactcctttctatccatctctcagtcatacaagtctaattgaagttccaggcacaccctgctgctctcatacttccttgccactggacctgccctattctgtctttttcaccagttaatttctactcactcatgatgcagctccttgttctcctccttctcaaaccttctgcaatctgctacagtctgagtaaatgtcccctgggtacactcgtacaatgccctgtgttcacctctcctcttagtacttatcttgttctcctaattgtgatcaattgtgaattcctcagaattctcagtgcctacaagtgcctggccctcgacaaaatgtccatgactcaaatgctgaataagcaggatccatgtctgtaggaagagtaagataatgccaatgaggtttattaactataatgcaagacacaactgtaagttatgattaatttagtaacgacatcactcattgagctgtcctctttcattgcatattgtgttgttttaaaaatcatattttagtttatgtcatcttttctataatagttcagactccacgttgaagtaccaaatacacagattactcagaatttcacgtattttccatcttgcttatttctgcccaatacctcatatggcattaagaagaactaaattaaaactttccatttctacatttgcaaaggcctttcctctaaaatgttctaagaaaggagacctcaggacacaagtagaaatggtactgtaaagtaaattgaaggttcagcctctggacccaggactcctgcgttttccaatcaccagatggaatagcgcagcccagcggctctatatcccctgttgtccctaatttaatggtgcctcccttatggtgaaaacactgtacagtgatgtttgaagggattgatgctccatggtaagcagacttcgccctactgggaacatgaaaaggaacctctctgatttgtggctgtaatcctcaagccctcgtttaaatagccagggcagtttcatttaatcaacaagcatgtgttgagtgcctgctgtaaaccaaacgctgagacactgaggagagaggatgaaaaagactcaacaggtctctgatcttgtggagtttacattgtgatggaggggtgggacactgggaagatacagactataactaagaaatagattaagaatagagaaaaacagtagacattgataaaggctatacagagaattatagtaggtggttacctcttacctctttaattcagatgagtcaaagctcttgctattcactgactgctatttgcttgacagcagtgtatgacatcctcatcaatattgcattcctggaaattgttcatcagaacatcttataagcttcttctgctcttccctcttgcagtagatctgcttcagctcaaacagaaaccactgggtatcttgcccaaagcagacctggctcatgccttctaggataattaccaagtaggagaagagcaaattgttataccattgggcagttagtcatgcactgctttatgaagtctcttctattgttgccttgaactgttttttaaagcacacactttaactttaaagttaatatactttgtactttatctccttaactggattgaggatgaagagactattttcttcttgttcatatacccacgacacccattattacttggcatataaaatgtatccagtaaatgtttactgattagatgtattgatttaaagatgaaaataagctaaggaacaataaaaggaagtttttggtatagtaccaagataaataacacatgcagaataactgcaggggcacataggtcagaagacaagaaagacgtggaagagaggagcttgagctggacattgaaagatatgtagtataagaatggacaggccaggcacggtggcccacgcctgtaatcccaggactttgggaggctaaggcaggcagatcacctgaggtcaggagttcaagaccagcctgaccaacatggtgaaaccccctctctactaaaaatacaaaattagccagatgtagtagcgggtgcctgtaatcctagctacccgggaggctgaggcaggagaatcgcttgaatccgggaggcagaggttgcagtgagccaagattgtgccactgcactacagcctgggtgacaagagtgagactctgtctcaaaaaaaagaatggacagaagagggtagagaaggacattcctgatgagataataatatgaaaaaggcaggtgtccctgtggggccggaaaggaaagtgacaccactttcctaattcatcttgcagggcagtgggcaatgagaataggtgagtacctctaggccagatgaaaaagagtcataaatgtcaggtgaaaactctcatagctgatgcgaagataccggaacgctttacaaggagagggattaatcaaagcagtgttttagaatgtaaatccctaaagcttgtgcatgcctagagcatccaggtcacactcaagtagaaggctcaaagtaagaacacttaaagggaacgaggagcttgaggaagtagcaaagggttgaaaacaattgctttagaaaatcagataatgacattatgatgttgctccattgtatgtactataatgacccataaaacactattacttaagtctctgtaccattttccgtgccttctaatgacatagcctagaaaagttttccttttctatcttccccttttagggtctcaagattagctcttctgagttccccttcttatccataggactttccatccatttcactttacaagttctctaatttatttcttatgttacactttaatcaatgggtagctacagtgtatataaattatggaggatacaaaaatgagatatggacccttctctcctggagctcacaattgaaaactgattttggttagcttaataatcgtgaagataagaataaagacttcatcacagaaaactaaataaagctacattaaaatttctaagaaaaatatctaaaattacttgaaaagccagtggagtataaagaagaaggatttcaaaatatgttttctccttgtcagccatgtgagatttttctctctctgctttaaataattaggaaatgtagaatttattttgacttgttttaatatatgaagtgattttaaagtgtgattttttaaaaatgctattaccaaaactttcaaatgtatacaaaactaaaataatatcatgaacccccatgcacccaccactcagcttaaggagtttttcactcatggtcagtcctatttcagccacacagcagctactctcctacacccagtttattttgaagcagatctccaaaatcacatcatttcatttataaatattttaatttgtatttctaaaaggtaaggacttggttttatttgtttttgtttttgttgtttgtttgtttgttttttgttttttgagatggaatcttgctctgttgctcaggctggagtgcagtagcacgatctcagctcactgcaacctccgcctcccgggttcaagtgatcctcctgcctcagcctcctgagtacgtgggattacaggcacacaccaccatgccaggctaatttttgtatttttagtagagatggggttttaccatgttggtcaggctggtctcgaacacctgacgtcgtgatcctcctgcctcagcctcccaaagtgctgggattacagtcatgagccactgagccctgccaaggactcatttttatttatataactacaatactattattctacctaaaatattttacagtgatttcttaatatcatatccaatatatggccagttttcaaatattcccaattgtcttcatacttctttaaaaatagttttctaatgtaaaccaggattccaataaggttcaaacaatgcagttggctgatatatcccaagtttcttgtaatctgtaggttctacttccatcttttttcttcttaccacttatgtgttacagatgccaagtatttgtcctaactccatttccacggcatcatttgtcatgttcccctatcccttgtatttcctgtggattgagttaaatctagaggcttgccctaagtttgattttttttagcgggggagagggagtgggctaaaatgctttctagatgttgctgcttgttttcataggcataatgtctaattatctccctttttatgacattagcagcctagatacatttgaagttgacccttgaacaacagggagtttaggggtgctgagccctgcacacaaaaatctgcatataacttttgactccccaaaaacttaactactaatgagctactgttgatcagaagtctttatgataacatagtcaattaacacatattttgtaaatgtattatatactgtattcttataataaagtaagctagagaagagaaaactgttaagaaaagcataaggaagagatacatttatagtaccgtactctatttatcaataccatctgtttacaagatgaattttctgaaatggcaaccacggtggcacacctcaatctgtggtacatatcaagcaattcaactttttcttgtaaagtcacgacttttccctgcttcttgggagcacttccaacatcactagttgcacattgtatgagtcctatggtgttagtcaaggtctacagtattacactaaatgtgatgaaaagtatgtgagagccatcacttcttcctgtgatatgcaatttactggagagatgaactgctcacatagaggtgattagcatccgcagcattttaccagatactggcaacacttgagctcaccacaatagcaacaggaggtagctatgaaattactacagtagtacagtatgtactacagataatgttctgcagttatgatttaatactacatctttacatttgtttacatttctctcatctgcaaagggagccatgtacaatctgtgtttatgtgcatatgttttgacaaattttaactttttataatagatctgtgtatactttgtggtagtaaatgctaaaataaactagcatccacatatatttatgcattcataacatacctttttcttaattattttgatatttccagactatgtggttcattgtagaatttttttaaattgtcacaaatctccaaaaaatttgtggaaaaaaatatttgaaaaagtggatccacacacttcaaactcatgttgttcaaaggccaactagatttaatttcagtatattctgaatggtacagtctaatcatgtaattccttctttattaatttaaataaatctatgcaaacagaactttccccttatcagctattcagttactctgagatacttttgtataagaaggtaggataaatgcctcattctttctctttatttacctatttttaaaccatcagtttgtttactagtatcacccaaagatgatttatttattttttgtgtcattattaactgatggatttaaaaatatttgatgtgtttcattccattgtagtagctattttattgatgctcaaattgtcccatctttggccaattgaaacatctttaaactggttctgagtccttttgacatgaccctcatagttgttgatatcatcctggctttctgataggacaaattgtttcaggctatcttgtacatgtcctgccctagatctgaaatcagctatctcttcaaagaatccaatttattttcctaggtcatagtatttagaggccacagtctgaacagtaagtgtgtgtgttgctactggattgttcattgtttctaggtcttttcagcagacaggactaggaaacactttttttctccaacatgaaattatattactaattatatgatatttccaatttaagttgaggactataaaattgcactttacctcactgatgttacatctgcattttctttttcccctgcctacaatcctggctctcagtggaacaacataatcactcatttgctttatcccacaatacacacccagtagtctcagaaaaacagtatcaacacgatcaccaacagtataactattgaaaagagttttctgtagttctttttgtttttagtatgtatattctactagagatgtacaaatttctgttaacctatgatgcatattactctaaatatgatatcatttccatttctctctctctctctctctctctctctctctctctctctctctccctctctccttttttagagatgggatctcacccaggctggagtgcaaaagtacattcatagctcactgcaacctcaaactcctgtgctcaagcaatcttcccacctcagcctcccgagtagctaggactacaggctggcgccattgtgcccagctaatttttttaaaatttttatttttagagatgaggtctcactatgttgcttaggctggtcttgaattcctgggctcaagcagtcctcccacctcggctgcccaaagtgctgagattataggcaggagccactgcacctggccatttttattatttttgttttaaaacctccactattgatttctaaaatgtttaaatgcttattttctaatttttctttataatgtggggaagagaatatgagtaggaatcattatatgatttatgaattaccttggagtgtcatagttagatcctcaggatactattgcctgttctttcttcttagacctgactcaatttcacaatttcattcactcattcatttaagaaacccaagtaaatgctatgaagcaattggaaaagaggcttaaggagagaatttaacatatatttgttgtttactatgtgtcaaaattatgatagatgctttacttatctcataatttcataagaacattttgaagtataaattattattatgtgaccaattttcaaatgaggcagttgggaatcagggagtttcctttgcccaaagtcataaagatattaagtagagaagctagaattaacatatacagtctgttttactcccgtgtcacatataagatgcagtccctgtccttaaggagttaatggagggttgagacccaagaagaacagagtacaataggagttcaggccaaaagaaaggtattaaactgccggggcctcacaaagaggtggcatttcacctgattatcaggaaataataaaatgtgctggatgtagagggaatgcatcccatgtcaaaaattggagatgagcaacattctgtaggtaagaaaatgtgaggggtatttaaaatgataaccagtcgggttggaccaaagtttagttaatatagggaaatagaaaactaaaagcgttgcctggaatctcagttgggatctgaaggtcattctgaggattcaggacagctagaaacttttgaaggtttgagcaggagtgaaatatgctagggcacaatcctagccactgggcaggctccggctaacccagatccttctccttggaaggactccagacaaaacccaccctcatagatccacaagtcttgctgattgactgcatgtcttctagcaatttcctagaaaagttgcattttcttcgatgttttgctactggaagttttgccaaattaagtcttccagttgaagagagatggagtagccccacatagcattgcattgcgattggcagtggttttctgaagtctcagatgtgagcaaataaagtctgactctaattagacatacttaatctgctcgttgaaacttggagtcaaataagtcttagagtgacatttcagtcttagagtaacatttcactgatttcttataagagctttgctaaaaaatatgcttatcaatttaatcaattataggattctagaaatcacaggaaaaacatcacaattaaagagattttggtaaaactgagttaaaattgggtaggactttttactataaaaataagttatatctaatgttatacaataaactgcctagtttggataatttcattagcttaaactcttccctttgctcagtattaaagttcagaagtggccacctaacctaacattcttacatatccccctcatggggacttttaacacagtgaattaagtgtcccctttattccatttttttataagaatgtatgagattgcataattcatgataactaaacttacttttaaaatatgacatttgctgtcttaattctttccagttcataatctataaatcaaatatggtcgagctctgtgaaatctattagttatgcatcttttgagacctgagtgatccgttgcctatcataggacgagatatgaagtgtgtcctcagtattcttagtacccacccttctttccttccttccttccttctttccttccttccttccttctatacatgtattttttgtaatagcttgaatagtttactgtcatgtaagagaatagtatcttatgtagaaacatagcgtggacttcaccaatactcatttttggaagtttaaacctaagagaaaaatgtttgctggatacatctttataaaatctacatttttacagaaatagttcattgattattataaatatcatgtttgaaaaacttttaaaaatgaagttacacacagatattgtttaatacctttagcactatactgcgaagtgcactgcagaaataaagccattgtttatttagatgggtcagtgattccagactcactactcctcacacaagattttatctgagataccctgatcattgtagtcatttggcttgtgagcttcagttgcccccccatacgcttaaatttttcattttgtgctagtgtagaccaagtcaaagcccacataaacccaatatatgtgttaaggttagagttgtgcttcacactcttgactgtactttaaaatcacctggggagcttttaaaattatctcagtgctggggccccactcccagagagtcagagctaattggtcaggctgcaaggccacaacagttgcacaaatgcaggtggcacctcttaccaagaacctcttcatctccctggccttccaacttcctggagcacaactccactgttttccatgtgaatagcacccctgtacttgtgcaaacttggaagccctagcgatagtggctgagcacccatgttttcagaaggcccccaggtgttctaatatgcagccagaattgagaaccactgacatataactttgacattaggtgtatggattaaggagctgtgtagaaatagattcaagatctagctctactactttttagctgtgtgaccttaggaaagtcatttcactccttggaacctcaatttcttcctaaataaaatagtaatactaatacctacctcatgagattatataaaagaaaaataagatggtcaaagtgaaatgcttggcacaaagttaacacttaataagccacttttattattttagctattaaagcaagatttctatattagtctagattcctacagtactaagttacagaggtctatctcagatgatctgaaacaaaaatggggaaattaagcaagccacggaaggatagagtttgatttggcctcagattttggcatttgaatgctgttaggacacatattctctctctctttctctctctggggcttattccagcttctcttttcatggtgcttgcattctctcagcccaacttccccccttggggtaaaccatgaccatgggcagctcaagacatatcttttcagcctctttagcacagaacaggcaaaaaattcatcctatctgacccggttggaaaagttacagtgacccagcctggctccatccctgtggtcaagagctgtagtcattaaaacggggagaaggagtgctgtgcaggtaaatacaataaccagctttgtttcattgttgagacctgattcaaaataaataaaatacataaaactcctgccattctaggatctattggcagacaaggaaagtcagcagtaagatcccaagagcaagaacttccctgaaattaaaacacctagtctctccactctccatgatctatgcacaataatcaccccttaaggtgaatttaagatcacagaagtgtgccttatcccctctggtccagtttatttgagacgctcaaactcacaggcaaatgaggagttgaatcacttcataccaagctcccagcaatctgcattattgaatacctgaagtgttctgtcctcccactcccaccccatggtatttccttacccatacaagtgagaagactaggcagagttatttatttatgtaagtgttatttataggaacactctctacagctactctaacgtgtatgttatccaagaataaggcaatgaggtaaaacaaccacaaaaggcccagaaacatcctttaacatttggattgttctaaccacttacctgacacttgtggtggagaggcaacaagtgtcatgaaagagcaacaagattcatcacttatagcagtgtgcttttgacaagttacttaacttcctggagcttcagtttcctgatctgtaaaatgagggcaataatatttcaaaggactattgtgagaattgaatgtatttgataagtgataatgtatttgaatgtcaattacactctgtacagttgacattaaataagtggttttccaaggggggtgaataattttatatttaaagcattattgaaaaagctttgctatgaacatgttctcatgtatttggacccagtagagaggatgactgggcatgtactcgactatcctaagaaacattgcaaaagaggcacaagtactattggtactcaccagccattgggttcttagcatacttactttgtggttacaaaaaagagtgatggagctactagcatacactataaccaccctgctactatactggttcagtgtccttgtttaggaaagcagcctgactcatttcactgtaacatggtacaacactgcagagaataatgccaagaagaaaaatgtcaaatattaataacattactagctcttctatttcaaagaatgcctctagggattttgaggtctctttatagttcctattcagccaaagtaaattgattgattataggtgataagagtcggtggaggattatatgagtgaatgtataaaagcacctggccaaaggcacagaatagcacttggactgactctcacaggcgacatcaagttctagtttgtctgctatggactgactgggtattcttcactgtaaaggagcctcatccctaatggtgatgtgaagatagtatgtatcccaaaatatacatagggtatgcattttctgtgacctggaaatgggacaagtacctctgtaagcctcacttattttattttttttcacactgccatgagaaagtaaatgtaagcctcttttagcattaaaactctataacccaaaccccacatttttccagaagtgaaaattgcttacaatgtaaaagatgaacattttgaatgaaggagcagtctactcataaacttttaggagcaagagatgaaatagcacaaaactgcctatatcaaagaaacacgaataaagttcagacgtggattttaagttgttcaaaagattggtacttcaacctactaaaatactggggacaaactgatgagaatatcttggaagtgaaggaacatatttccttaattttcaacatgtagtcttggaaccagttttatttcaaattttttctaatataaatatataaatatctgatttatacagtttatgtatcccgtggcaatgtgatcttttgcttcttttattttcttcctacccctcccccatctttttcttgagggaatcaggaaaaggtgtcctatttctcaactgttgaatctatttatgaaaattagaactaaacagtttagcacaattaagcagaatgccacattcatcaaatcttcatttttctaagacttcaattctgtcagtcactagaaagcatgtgctaagtggaagctgtgtttccggtcttttggcatcccacatctgttgacaattacagaggcacatacagtgccattcatagaatggcatgtgtctccctatgccttggttcacaggccctcggggacatttacaaagtgtgtactttttaactgtcctagaactaaggagtttaattttgcctgagaatgtgtttatgtgccttgtaaaggagctagtcattcccttttgctttcctttattatgatgtgtgtatactctgtgtgtgtgtgtgtgtgtgtgtgtctctctgtgtgtatgtacaccaaagaagaaccacaccaggaattgagcataaaggctttctcttacccatctacacacctttcttgtaagttgctgcttttattttttatttattcttttgttaatagtgtatttcttggcttctgctggattttttttctgtttctaaacactatttagttctgatttcatatccttatgttcttcagtcaagactggggtcagacttctttatattatatatgtaattattacaataaaagtcaccatgtgtggtggcccacacctgtaataccagcaatttgagaggctgatgagggaagattgcctgagcctaggagttcaagaccagcctgggcaacatagcaagaccctgtctctacataaaatttaaaaattagccaggcgcagtggtgcattcctgtagttctaactacttgggaggctgagggaggaggatcacttgatcccagaaggtggaggctacagtgagccatgatcatgccactgcactccagcctggatgacaaagtgaaaccctggctctaaaaaaaaaaaaccaaaaacaagtccctggaccctctctggagctatgccctctttcttttggatctcttcctgacccataagcaaaccatattcttcaggaagtatctagtacctagaaaactgaagctgaatctacatgtcatctatccaggaacttcatctcgctagtcttaacacctcagatatttggcaatacccagaatattgaccatttttcctattttcatccaaatatttaatattgggtatgcatgaccatagtaacattaatttttttcatttaaaagataggtactgcctttggacattgtaagcatctcttgttaataccatgaatagttaaataaattctagtataggagccacctagaggagttgtttaacggctgaaagaagaattaggtgaaaaagaagttgagactgaggctaaagccaattgtggtttcatccacagtggttaatggtgtttcttaatctttaaatatcaaatgtgttgtaatgcttaattatccttaatacataaaggaagtgacctacaaattctttactgtttattgaaaagtagcatatttggaggctttgacaattctacagaagagaggaagctgttaaattctaggctaccatgtccttcaaatgggaaaaaacaaaatgcctgagcatgtctcttctccagcattaaatttttcatcagtttcctattaaactcaaggatatgggaagggagcaattttaattgcttggcacttaaaaagcctcctccactgttcaatgagttagaaatattttgaaaatttgattgcatttagaaccacacaaatttacctgtaataaaatttttgctgcacgcttaaataatgtcttctagaaatgaacatttaaatgaactatagaatgctcagggggtaaagggaagctaatatttattgaagaccataaggtgccaaatacagtatattcattattttatttgctcttcttaacatccatgtgaatgggtattgctgtttctgttttacgaataagaattggggctaaaaccagctgagggggttacctaaatggtacaaggtgcagggcagatctgaaatctgctctgtttgattgcagagtctgttttccttctctgttgtctttacattctcaggattatgttgaaaacagcaaagagtgccatcttattagctcatataggctttacagtcagtgcagcctgattcaccaaagctacacacccaccctcacacacagaaaaccacttgggggctgacttacctggatttgtgtctaaattatcccatatatcaaataatactagatctcctcttcagtttctgctttgtagttagcttaaaatatctcaaaactcacattgtcccagaggaataccaagaatgtcatcttacgttaagtaagtatgtactgtactgtctcatattaattaaatttatggtacctaaatcaagaatccttcagattggcttttgaagtgcactctatctctgccatgggaagagcccattttgaggttttcctacacaaaagaaaagaaagccacctccaggtatccttagggtcctttcaactgatccccaaacagaggaatctagtttcaatggaagtttttaataaacctcattatttgacaattagtcaagtgtctggcattccttctttctttatttttccacttctgcttatgctttcaggctcctttgatgttgtttgcccctccggtggtggtaaatgaccacaatggctaataggctggcttccacaggtgcctgttaacaaccacttcataaatattcaacaggagcattctgtgcgaaagactggggaattaggtgacctgccaaatctttccacatccaatatctatgataatggatacacaaattacgcgggacagaaggaatggccttgcactgtgaaaaaccgaaggggaatcaatacagcctgtggctcccagctcaggcaggcagcctcgcccagtatacttctcccaggtgccgacttggggggtcaagggctttcccctctgcctaatgagcagttcttccatagcaagtcatcaccaccccagagtggtgggctcttatctgtattttaattttttgttataatggtaattagcattacatcttgaatagtaaattaagaaacccaaaacagaattttaaatttaaaaagcttttccattaggaatccagttgcattaattttgtggatggaaggtgagctaaattagccaagtttgtgcattcattacctcgttctaatcctcaacatcacaaatgcaaaagactgtcattagatttgagaactgacaagaactgggatttcacagtatgaatgttgaaagattaatttgaaaagatctcactaaaaaacacaaaaggttattgctaacatggaatattttatattcatagtctgtacctagttttaaaatgcctatttacagttatctggcttaaaaataaatggtacatttacagtacttgatcaaattggaatatttctaggtatcttgttttgatgatagagaagtgtaggtatccaatattatatgataatattggaaatgctttttttatcaagagatatttgactttcaattattatatccaaagagaggttaaaaataaagagaaacaagaaagagaatgggctttttcacccttttacttcatagtatgttgtcaaaaaagaaagttattcttttgcaatatttcaccctttgtgtttgccctgaaaatattaatggtgaagtagaaatcacagtgatgaaagcagtgtcatacatttcatgaaagtacagttaattttcaccaaatgagttgccaagctggtagtgggtaaaaatgtaaatgttcatctttgatcaattgaattttaatgttgtgaatagctgtatgccttgatttatacatctgtagcacattttaaacatctgtgttcaagatgaccatttgggaaaagattcattggcttcacttagttcatgttgtttggttctatatactatattcaagtcccaaatgagacttttctaaaaagaaattttacacaaattgcttactttattatagactgcgcaacctagaatggcattttaaaaaccagcatgggtgatttcaccatgagttttcaaaggttatacaattgttgaagaatgaaaatgtatccgtttcaacagtgaaaatgagaataattgatatttaaatgctacagtagctgaggctaatgtttctcttaggagctctgttaccacaggaccctcactctctgtgttgtctttattagtttctaggagatttttgcatttagaacctatagcctagcttttaaaaaatgctactttaaggtcatagactggagtgtagcattatttttcatcaaacttgattaattttaaccataggtagctcaaaagaacagctcaattaaaactaccacatatacaggaagaaaagaaatagattgcctgtagcttagctctaaaataggaagtccaagctatactcgaaataacttttacaggtgacccttctatttttaagacaattataagctgggcatggtggctcatacctgtaatcccagcactttggaaggccaaggcgggtggatcacctgaggttgggagtttgagacgaacctgaccaacatggagaaaccccatctctaccaaaaatacaaaattagccaggtgtggtggcacacgcctgtagtcccagctactcaggaggctgagacaagagaatcacctgaacccgggaggcggaggttgtggtgagccgagatcgtgccattacactccagcctgggcaacaagagcaaagctcagtctcaaaaaaaaaaaaaaaagagaaaagaaaagaaaagaaaattatagtattaccatttctaaaatgtctaggcagccattgctattaagaaagttgcattgcttctatttaccttacaatgtgtttgcatctttcctaaaagcacaggcctagaagtaattccaatgatccagggggtagtccatagtctccccttcgagaccagagctacagctgcagattttgctaacatcagaatagtccgctagttcttcttcattttctattagtacaggaatccccccatgggcttaaaagcagcagctttgttataagaggatcttttaaaaaaaattactcttgagatccctttctgctggagatatatttattttgtagtcaataaaaacttacaggaccccttctgaaagttttgcttggtaactcataatttaaacatctgtcattttttcctttttaacactaccctttatgtgtattgaactcaacctaggatggggtagggagtactgatcctttctttaattttgagtggccttttggaaacacttacccctggaccagtagtattcaatgtggttaacaatctcctgtacagcttattacaagcgcaaagactcctgagcccaataccccaaaatactaatgtagtaagtgtggggtgagactcagaattttcatttttcttaagttcccctgcgggctaagaagggcatctgggaaccatcctttgaggagtaagatggtctctgagtccttgtttatctgtttacacagaaactacctattgtaaccacctaagaattatgtgatctaggcagtgttttcccaggtatactaatgttaacagttgcagaagcaaaaggataacactgaggttacttcacacgaatggatgtttgatggattctgagagttccctggagtagggagacctgggtgagttccagggccctgatgctgatgctctggcattgtgcaacttaaatgactcagttttctagtgtgtgagtggagataatcatctttccctcctacccacataattccaatgctctgacaaatgtcgaggcactacctgtaaaaataatctaatttctacatgatggtgtagttatataagtaaaagttttccagaacaaaataccaattgaaaacctagcattttttaatgttttataatttccccccattttagatgatagcttgtaaaactacttcctcacagactttccccataactttctactttacctttaacctgtgctaattcatttctataaagacattgagataccagattacatgtcatgtttctaaaccactctctaactggtgtccttggaaatttcacatttcccacactcagaacctaggagatcaaccatatttgactcaccgaaaataataaccagtctgggatatggtatgggaaaaaaattaggttaaaccacaaaactcttcccaataatgagtcagtgtgtgagtgcctctgtgtaagacctcatttaagagcagcaggagctgagtgggggacagttctcaagcggttctttggaattagcatttttgcaaggaagctttcttacccaccccaactagagaaacctctcattgttttacccacctcatcctctccaaacattatgatgcaacttcacatcataacaggatgctgcaagagtccatgcccctttaacttctgctttgtctaagaccaagaacacatctatggctggacaaattgggtttatcattcattgcagtgagggagaactcatgtcatggggacccacgatgcatctcaataaaagggtgttagaagggcttggaggaggattgagattttgtgtagaggagagtttggtaagagtccaagaaagtggcgttcgctctagactgggcgctgttgggaagtggggaccatcctatgactgtgtatcttaataaactgtgtctacagggacagaagcccagaaggagactaaagctttaattagtaaagatgcagccatcacttatatttctcagaagaggggatgtctgatattttgtggtttgccagtgactttgttttttctgggcttaaatgaaattatgaactggctagttttgactgacttcagtacagtcacagagtgaccttgtctgttgctggcgttccatgagattagttatttgttcatgaggagaacagatggcatggtttctttaacagcactgatacctacttgtaattgtcaggccagttcccagatgtcagaggctacttcttttttagatcagatacctttgtagcataaaatcagttttagggcagtatgatttttcatggtgaacattttaggttctctttgtaggtgctggtttttaaattaatctttagttttgccattgtccatttatgatcagttgatctgatttcaaaatgcaaatccctagcatttaggaacttatacattgggaacatttagggatttaggaaaagtgggaagagtgaagaaaggtttctcccatgaagcagtgggtcagtagggaaattataaggaagaccaaagagaatgaaatggttaccaaagtgtactaatgtgagagatacaaagatggatggatagatggatggatggatggatggatggatggcagagagagagagagagaggatgaaaatgtcatgctcatctgaacctcattcttatcaccccagggaaactgcagttatcctaaatgcctctggtaccaataactgacaaaacacatgattcctaccatttagttattcgtctgtttgtatgtatgtacatacgtacatatgcattgcatctgtttgacacataatactgaaaccgtatactgctaaaattatgataaagagcagctaatgttccaataggcttttcttgcttcatagctaaggggaaaatgtatgggatgaaaactccagtagaaaactgtgtgcggcatttagttttaacacccactacctttgaaatctgtcaaaaatccattgtccgctgtggttagcctcagaatcataaggtttaaaggctataaaatgttcagtttcatataaacatagaatggattcaggatttgaggtgatgcattccttttccaataggtacttctgcataactacccagtagagaaggatcctttcacaaaaggtgtgggaaaactatactacaagcctgcagtaaccaaaatggcatgttacgggtacaaaaacagacacataggccaatggaacaggttagagaagccagaaataaagccacacacctacaaccatctgatctttggcaaagccaacagtaaaaaacaatggggaaaggactcccaattcaataaatgctgctgggataactgactagccatatgcagaagattgaaactggactccttcctctcaccatacataaaaatcaacccaagattgattaaagacttaagtgtaaaacctaaaattataaaaatcctacaagaaaaccttggaaataacattctggacattggccctggcaaagacttcatgatgaagactccaaaagcaattgtaacaaaaacaaaaatcgacaagtgggacctaattaaagagtttctgcacagtaaaagaaactgtcaacagagtaaatagacaacctacagaatggaagaaaatatttgcaaactacgtatctgacaaaggtctaatatctagaatctataaggaacttaagcaattcaacaaactaaaaacaaacaatcccattaaaaagtgggcaaaagacatgaacagacacttctcaaacgaagacagacaagcagccaacaaacatatgaaaaaatgctcaacatcattaatcatcagagaaatgcaaatcaaaaccacaatgagataccgtctcacaccagtcagagtggctattactacaatgtcaaaaaataacagatgctggcaaagttgcagagaaaaaagaatacttacacactgctggtgggaatgtaaattagttcagccactgtggaaagtacttttggagatttttcaaagaacttaaaacaggacctaccacttgacccagcaaatgctgtgtgtatactcagaggaacataaattgttctaccataaagacacatgctcacatattttcatcgcagcactattcacaatagcaaaacatggaattaacccaaatgcctttcaatggtagagtggataaagaaaatacattcattacctgggtgacaaaataatttataaaccaaaccccaatgacacacaatttacccatgtaacaaacctgcatatataccccctaaaccaaaaataaaagttggatagaaaaaagaaagaggtgtgagaaaagaccccactgtgacacataagtggcatagataacagtggagattcactcacatttgttgagtattacctagacagtggagattcactcacatttgatgcgtattacctagacaaggaggacaatggcccctcttcctttctgtattctttgtaaagggtaggccttctgagaggttaaaccaccaatcagaatttgaaatctttaaagtaatcaatttatccgctattcatttgccttctactttaaatctaaagttttgtcacagccaatatttatagtctctgacatcactgggatcagaatggaaatactaaaatctgttttgtggtatcctaaattcactgaattagtatttattgtaggactcccatagggtgtgagtctttacaaataaaggtagggaatgccctttatttgtaagggcaaataagttcctccttctcttgtcaaggggatgtgaaaacctccttgcacattttttcttttctttttttctctttgcagaatgagtgttctgagaagaacaaaactcttttctgacaactcttataaaacacttttgtgtttgattctccaacgactaagatttggacacacaattctccattcatttctcaagtgtcaagaaagaattgagtttaaaggctccaattcccttgcaggttacactgtctatctagatgaattagtattcagcacagctttgggaaaatctcaaatgatttgcaggtttgcaaattgttcaaactcataatgaaatttcaggctgaggaaatcactaaacagttcatggcatgagtttttccctctgagatctggacatcttagatcaattcactcctctaccttcgctgccccatccatgccagacagcccagggctgcttgagaaagtcacacacacctgtcaccactgaggttattctcctatccccatgtcctcccctgctcagcaaaccagcccactctccatccattttcattctttattttctgttcctatagcatgtgttcctcttcttatccagggctatgttctgagtccggtccccctctatgccctcaagcaactcaaactggcaattatttatatcctattgcttcaattctctctcttctctaaacttttcccatcagaatataaatatttcaagtattcgccattaaaatatatatatatatacagctttacccaactttatgaacctccagctctttcttttctttgcagccaagctttttgtcctctcactcattcctccttccagtgcatcctgaattccacttggaactgtccaccaggattaccttcccaaggacacaaaggtcctccttttggccaaattgaactggtgcattctagtccttttcttgtttgatttttctgaagcattgacatagttgaccaccacttacatcttgaaactctgtatgtccttagcttctcttaactcctcttttcattcctttttcgcttcccttccttgtgccagtcccttacgtgttagtatatgctaggatctcatccttggactctatttattcaggtcactgttcctggaagataactctatagattctcaaatctatatctacagattttggaagccatgtggccaatgttaccacttgggtatcctgtaggtatttaaattcaacatgtctgaagccaaacttctatctcacccttaccacaacccatctctaggaatagaaattatcgtccaagtcgctcaaacctgaaaacttggcattgacttagacttattttcctcattcactctcccttattcagtcaatccttaagataatgccatttctaccctttaaatgtagcctctcctttattcattgtactgctgccttagttaaggcactcaaaattcctcattactgcattgctcccagttgtcttcccaaaatgtggcttcccattctttcaaggccaactcttgagcatgacatattggtatataaaggcctacatgacttgacacttgccaaactctccagcctggtctctcatgggtttttcatgtggacttaactctggccatagcatcctgctggaaattatttaaaaacaccaaattatttcacaattccttatttcatatgctattattccctttgctacttatcttttaaggcttagcacagagagcgtcttaacacatattactcaagagatgttagcaatcactattgttgtttttgttgtcatgtctccctttagtatctaaggctgtttggtactcctcctctgttttcatagtaaacttaaaacatagccttaatcatactatatcatagttggctacttgtttttcttgtcaccaaattctgaattttacttttctcacttacattgccttcctggaacctaaaagcatttgggcttgttatttctgtttaaaataacaaagaccatcaacaaatttccagtgaaattatagttgtggtggggatgatgatgatgatgatgatgatgatagctacatttattgaactctatgtcctaggcacttgctaaatgtttttaaatgttttccattataatcttattaatgatttcatttaatgggtaaggaaactaacactgagagaggtaagtaccttggccaattcatataagttatgagtggtagagccaggatttaagcacatagagtagtattccagagaccaaaaaataaagaaatcattatctatgtcctgatactaaccttatccttattactttatgagaaagagagcctggaaagtcaattcaaaatatttgttacatgtctactttatgttggattgaattaggtctttgaataaaacagctcttctttgaactttatctcctagaaagggaaataagatatgaacctccctaaataactaggcaaaatattataaatgctaaaacgtacaactactataaaaatggaaagagagaaagtttaaactggttgaggaaaactcaggaaagtcatcttggagaaggcggcatttgatatgtgcctgaacagttgagtcctaatgcgtgaagatggcagaggattgaagagtgcatgagatttgaagggtacttgtaaggaatggaacaaccacctcttattactctgctttatggcaaaggagtaagatgaaggcaagaggccttcatagagctttctccctgcagagaggggaagagtatagtccctcatgactcagaatctcttggttgctgccatgcaggcatctatggaatcacaaaagcaaggcccaggaaactttaaactaacctatgcttcccgcccagaattcagtctatttccatattagtgggtgccttctgtccgtacctatttctgtgtgcaatgtgttgagtcttttgagtggtggcttaacagcccaggagagaattgagctatactgaggcttcatatatgaacacagtatggttctattcttgaaaaggtttccagcgtccttttccaaaactatagagttgtgctgctcctgtctagaaagcagctcagtgaacttgaccttgacccttctgctgtatgaacttctcagaagattgcagatacttttattcaataagtctattccccctttttttgtttagtcaagtaggtaactattttgtgggtatattttctaaggtcaaattcctaatgataatagacaacctgaagttgatagtggccaactccgtgacattgctacttgataaatataccaatcttaggatctcttcttttttttgagtacacaaaaatcattttgaaatgcctgacttgctagttttttgatgccttacatatggaatatgcttaataaattacatttgttatttactatatgtgactcaatatatacatatgcaagtacgtatgtgattgtaacccccattctttagtcctactctctgtcaagaataagaagcttaaaggtccctataaccaacacagaattcaatggcctctgtcgtgtaagtaatgctggcagctacaacaagcaatcccatctcagtggcttaacaaaacaaacatttagttcttgctcatgttataggccagtggggaacagtttgtgggaggggtttggggaggaatattgtgcgccatgcaggtattcaggtatccagacttctatctactgacctggctgtgccctaaggtctcagagccttgaagttctccactggaacctctgcaactggttgcccagacaaggagagagagagagagagaaagaaagaacatgtaaatttacaagagaggtttctggaagtaccacacatgacttctgcccaaattccattggctagaacaagttacatgttacatggccctaactaagtgcaaggggagccaggaaatgttgccttcctatgtatccagaagaaaaataaaatgatttgttgaacatacagcattgtctctatcacagcctttatccccttcattattccactcatttctagtattttgaaagtttcaaggtctcccccaaccctcagatgtcaagagggcctcctagtagattgatggagagagttggggatacataaagaatgcagtcttcccaactttacactactctctttttcctggatcatggctttctgcagctgcttctcatttagttcagtccaaaaacattaattgaaatcccaccatgaaccaagcactgttgtaggatctggggagtcaatgatgcacaagacagtctctgccctcaagatgctgagtctagtggggtcctctactactgtggcatgttctttcatcaactccaaagggctttctccagtgcttttccccctcccaaacttctgggttcttcagagagaggtcatactccccttccaactctagacagcaactctcagcagaagccctgctggtccttacaggaatagtctgtgtttccaaaaaccttctttgaacaccctagaattaattttgagggataagtctagaaaacataacccagagccatattcctgcttattattaaggtcctctttagattatgtcctcaagcatggcacacattcactgatgttctctggcacaaggaaaactctcatcctctctgagtggattggttgtcttaatggtcacagtacaggtcatcatacacctctggaggaagtctgttctccagtattgagaaaaattagcagtagaatcaaattccccttcacaggggaatttattcaattgggtcctggaaacagccattgatatcccatgattcccaaacagagacatgcaaatagaattctacaatagcctgaggttgtatgtgtgtgtgttcactcacacccccacacacacatacataaacacacagatatgtgtataaaattaaatttagaaagccattttgtagaagagactgacttaggcctgttaaataaaagtttaatttaacaaagcaacccggtatttttttcaccaagtttttaaagcattcaagatgctaaattttccaagatgagttttctggaagaagtcccaaaactcccttctctctctttttttttttttttttttttttttttgtgatgaagtctcactccgttgcccactaccaggctggagtgcagtggcacgatctcagctcactgcaacatccacctcccagattcaagggatcctcctgcctctgcctcctgagtaactgggactacaggctcacaccaccaaacctggctaatttttgtatttttagtagaaacagggtttcaccatgttggccaggctggtctcgaactcctgacctcaggcgatccatccaccttggcctcccaaaatgctgggattacaggcgtgagccaccatgcctggccccaaaactccctttctgatcacatcctatcaggcttagaaggggcaggtattttcttttggtgggttcaactccacctttgttcattttgattataggaaaaattcttaagatatgtgtgttttttttttttctgactacgtggtttctcctagtgctaaattctcaccatgcttgaaatattgtagagcaaagcagctctagttatcctcaagaaaaggatcaaagaagggaaaatatattaatgagcacaataattcaaaacctcttaaaatgctgttcccaagtgtgctgggactttctggtcatgtctctgcgaaatggatattttggatcttgctttagcatacacaggaaaccaatctccaggcagttcttccttataatttctttacaagtttccccttaaagaattcctaatgtactttcctcaatagtaacatagatttttctagagttagaaaattatgagaaaatagagtgagcggctatctcaagtgtgtttacttgtctagtcccctgatattaactagctatgtacctctaacaccaaggcaaccacattattgatttaatgataagctgtacagcagtgaaatcacattgtttcttcatagacacagagaaagcagaagcatagctactgttgtcaaggaggttaaaatttagatgtgaacactaaaagtgggaaccccaactggaacataagttccacgagaggcagccttattcactgctgaatctctagtgtcttgagtagtatctggaatatgatacagttctccagaattatttgttgaacgaatggagatccaacagcatagagcaatatatcaccaagtattaaaactgtaagaatggcaggagttcactgagaaaagtgaagactttatgaagacagtggagttgagcagagccatagagctatagacttccaataggtggaggagagaggagcgggcaaaccaggcaaagagagatgagagaagtaacacaggaggtaatgagcatgttgcagtgggaaagtgggcttggctctggtcagaggaatcatgcaatggattaatagaatccaggcaggtcagggatagggataaggacttagacatctatctggttttgtgtcctagcttcgtcatttattcaatagctgaataaatcaccccttttagtctcatttaatatctaaatttgagaataatacatagaacatatatttttaaaattcaagaagaatttataggttaaaaatggtaaacttgaagagcttttttaaaacatggtattatcattgttattatttatgacaacagtgttctggttgaccttttgattgtggttttcttagtgggaaaatagctcatataatggcccccgaatgtatgcctgggaagaaatatgttaaaaaatgaaatctagtgattgattgtttattggataatttcaaaatagtacaagggaaaaaattattttagtactcctaagtattagaaataattttacagttcaatttgtgtgattaaattattgtatattatatacagtcatttcacaaaattgttatgcgggaagtaaagatccgttcagtcactgagttagcaaaggaacttgattagaataatactcaaccacgtttgtattgtcaggaaatgttagagaaagctttagtgttgttaatgactcttggcatatataatactcctcgtccttaaagaacttgacaaacattgatttaagcctcttttcaaatatattccaaaactaaagtcattgtttctgagtatgccataaaagataaagtacgatttggtggttctcacattaaaaaaactgttgaagaagcagaagtgaaaactgcatattcatagagtaatgatagtttgggagatgatagtgttggcttaaaacaaattgggtggtatgttctgcccacaattgatcaaattgtggtcaattatatagacagattcagcaaatatatagtatttctgccgtactatatatatatatatgatatactatatatgtagaagatatactatctctctctctctctgtttctctccttagagactctgagtctaaagcagacatcactaatcaatcacagattctttccaactgagtctttttttcttttttctttttttttttttttttttgccttttgaccaggaaaaggaatccaactgagttttgatttggccattatgtctctttgagatatagggctctaagtagccaataccagagatcagagttggcacaggcaaaatggaacctacttactatcctagaatcaaggatagttctacgaaagtttcaaagagcctcccttatcattaatggctgcaaatatataagggcatataattaataatacataaatgcaggacttaaatgacagtaatatctcaatctcccttcccacgtgttgctttcttcattcatttggcccttcatttttattcattagattggtggctctctctctctctctctctctctctctccctccctccctctctctctctctctctctctctctcctgatagctcaccttatgttaagtgctaaagagaaaagatataagacctgcttgctgctctgaaagagcatgcaatatggtacagttagggagataagatctagctgtgagaagcagtcacacatcctgcttctttttaaaatgaatgtgattacttgagttgtttgtttgttttgaaaataaaaatgcactcaaactgaaaaaaaggaaaacggatgtatttcttcctgggtttgcaaagccacttctgatttcaaagaaagctgctcgataatttcttacgggctcaactctgaaagaagctcttagaaaccaaagtacctaattactaagtcacccccatccaaccatcactactgtttgagttaaactgcctttttccagaagtagagagaggaataggggagaggttctgtgatgggaaaagaatgaggaccagagtgattgtatatgttgctgtttctcgctattcaacaggcaattgaaggcggctgctttacaacattggcaatagtgccttttcacttaccttcttttactcgcagtttcaaggattcagatttggtgttttgattaggaacatggtccaaaaggcctgagttcaggtatcagctgtgcgatttcagccaagttcttaacctatctacatgtcagtaaaatgacattactgacatttttcatctgtaaaatgagattaaaaacagtgtcactgagggaattatggtgcactaaaccacccagcactacacccagactttgcatgggctgaaaaaatcttgtctagtattatcactggtgatgcttagttgactatattagtttccttttgccactgtaagaaatcaccacaaagttaagatgacttaaaacaacaacaacaaaaaagtgtctttttttacgttctagaggtcaaaagtcagaaatctgcttcactgggctaaagttagggtgttagtagagatggttctttacagagtgtctgaggggagaatctatttccttgccttctagtgccttggggccccttcttccatcttcaaagtatatcactccaatcatctctgcttccaccattgcgttgtcctcttctccaactacctcctggtttcctcttgtagggatcattatggttacattggacccacccagataactcaggataatcaaccatcttaaaatccttaatttaagcacacctgcaaagttcctttttgccatataaggaaaaggtgacactcacgggccctaggaattaggatgtggccagccatctttggggatcattattcaacttaaccacattgactaatcagattattcaacatcattgagacagtctgcttcatagtgctataacgcagagtggtgactgtgaaccttgaggccatgagggtttgagatgctaatcaaacaaatcactttagaaaactagtattttttaaactctagtgttatttctgtaacacccatctatccttccactcctgtcttatctctacttgctcagaaagaaagatgaaatctgataaagcagaacagaagagcataatcctaaaactcagatagacctgagttcatgttccaactgcaacctgatggctagctgggttaccttgggaaaattacatgattgcattgggtgcattcctcaaaagcattccctgagacaaagatttgaggtaggactttatctgaaagatgatcccaggaaagatggatggaaagtgaggaaatgagtcagagaatggaaagaagctaataaacagtatattatcaagcaggttactcctgtgggccactgggtgacctgtgggaagtcacaggcagacagtgtagaacatcagaggtatcctagctgtggaaaagaagctttcatcattggctgaggactgatccctggcacattatcttccgcacttccaggctgctcctgaagcaggctgagaaagccctggggagactgcataggatggcctacctctagtgagaaacactgagtgccacactggttgtaaatggggtactagaaaggcctctctgaacttcaaggatgatagtactcagcttgcagggattttctgagaattagggattttctgagaatcacatgctaaagcacctactagtatgcatggcacataataatcgctcaacaagtggtagcttctaaataatgatcatatcaaaggtttgcctttggtttctgcttatgaaattagtttgcacatgagaagatcactcgacatttttgtgcccagtcgttttttaatctctaaaatcagggaggagagtaaactaaaccatcccaaagtgtattcttaggactaataatctaagtcgtcatggcttagtttctcatgtcctttggcactataatttcgctctggcttctatgctgatgattgtaaactgacctcagctgatttggtcatgtatgactcttaggatctttttggtaaatcatagtagcctctgatgaagttttgaggtaagagttgcctgctcaactggcaacttcactactaggttataatgaacagaaattccagacaaatactgtcacaataaaacatccatcaagtaaacatttattagcaagtaaacacacagttacacacacacaatttatatgacctgttttgtaaacttgagcatgtgtcagctgttatttttagctcctctgacccccatcttgcacaaaatattccctgaaggccatcacaaagattccacagtcaggaatttgtcactctttggctagcatcagggatctagaatccctcagtgttcctggctgggcataggactatttagagatttagtctaggtcatcatccctgagggtgaagtctacaggactaattggattcttgtgcccttgtgaagcaggtgtgggaagtgtttctaaaatatttctgccgatccacatgtaaggaatacttttaatttcactgagagtcttttcctaacattcactggcctacataacaaactaccaatttcatcaacagaaaatctgtttctgactttcagtatgttaattagcaaagcattgcttgtgggttgagatacaggtaacaaaaacttgtggtagctaattgaaaagaccaccccggcattgtgccttcttgattagcatgcagacagctctcgggttatagcttaacctaagtaatggtcacgtggtatcacacagcacatgctgaagtttggggatttttttagattatagtaaaatagacataaaattccactcagcccttgacaaccaacattctaccttctgcctctgaatttgacaactctggatacctcatctaagtggaataatacaatatttgtccttttgtgactggcttatttcacttagcataatgtcttcaaggtttatccaggttgtagcatgtgtcagaatttcatctctttttaaggctaaataatattccattgtatgtgtataccatgttttgtctggttttttattcagcagtggacatttgagtcgtttctaccttttggttattgtgaataatgttgctataaacattggtatacaaataaatgccaaaagcattttgacataaattacagatataacaatctgctccttttactaggaacctaaggaacatgcaaactattgcttaatccttagtattgttgcagtttagtaaaacacttgtagcttcttagtaccttagtatatctaaaagcattggtcacgtggatcttcaaaataagattttagaaggaaacagttttaaactctttatttgttatcataagcctgatttcatatttcattccccaaacagcttttaaaaatatcatttaccctatagtcatttaatttcctatacagtactttcattctgcaaaaatcagttacatttctacagctatttggtaattctgctttgtttctaggatgcagttgcataaaacattatattctgtgacctcaacctcttcatctgtgaatgctgaaatgtgccttcatcttcctttccattgggaggtcccgatactttacagaattttaataacttccctctgtaagaccatgaatgtggatagtatctgctctgaattctgatgatggccacgaatgaatcaagtggattacataccagcagagattggagggcttggattctgtgcaggatggattgtttgtttccttaatttatatgtgagaatgaatgtgtttgtaaaatcaggaaaacccaggaccaggcactgttcttacctacaggtatgctgtcagaaagcccctgcccagacttctggatatttccttaacatgcttggaaagaagtgtgtttcctgagtgatgagttcccgggttctgaccctatctttgcaagtgatagactgcaagttcttagaaaagttgaccttggactttgatcacacatctgttaacacatttttattgagcacctactatgtgtcaggcactctgccaggtgcttaggatacctcagtgaggaaacagtgctccctgctcttgcggcacggcgtctagagctgctccttgggagccactggccacatgtggctaataaaatatgtttaagtttaggaaaattaggtaaaatttaaaattaaattcttcagttgcactagccacatttcaagtactagacatccaaatggagatgtcaggtagagagtatgatgctaagaaagaggtgaaggctacagaaatcatttgagaatcaatagcaggagagccttgggccagatggatcgcaagtgagtgagcatagagaagagaagagccctggcagttccatcattaagagcttggggataaagagagagaatcagcaaagagccgagaaagagaggccagtataggaagaaaacgaaagagagtggaatactagaagccagtgaaaaagcgtattgggatagagggagtgattctcgtgtcacatgctgcaggaatataaagtaaaatgaggatagaaaacaaatcattggatttaatatattggtgaccttgacaagaacaattctattagaaggtgaagagcaaaagccaaacaggaaagaacagaagggaaggaatgggagctactgactctaatagcagaaatttgctacaaaggatctttttttcaaaaaggcttaataggtagtgcactaacatttatgggatccaggccaaaatggaggcctatatacaatatttgtaaataggtaaaagttatttatcaagctaacaaactattaaacaaatatgtgctttgcattatattgacaaatataacttcataagaatctggaaaagcagattccaatttagaattattggactttggagttctgttctataacttggtggcacagggaaagggcctgaggcccacatgccttggcttccaaaccccagcaccatcccatactctgaagggtgtgcttgtgaggggcctgcatgccctggcctgcatatcccagccctgtccacacttcttcaaacaacgatcccctgaatatctcttgagtccaggagtgtgtaaatcagcaagtccaccctaaggaagatggacccagagaagaggactatgaacaccctgtaaggggctaaggaccatgtgggcagagaattctgaggtgcagagtacccatgatctagatggcaggaagcatcagctctgactaagcacttctccttggcctagcaaatgctcacccagagagagatgtatggctggagaagggccagaatacagaccttaaggcacagagccaagggcagctctctgaggtggtggggaaatggggcaaagaaaaagatttttaagataagagaaataacatgtttgctcatgagaacaatccagtagagtgggaaatagatgatgtggaaaagaaaaggatagccaaagccattatctgagtaggcaaaagggaagaggctgtggtgtgcaagtgtagaaatgggctttggatataagcttgaacagttcctctacagcagcaaataagaaggcagagcatgtggatgctgatgcaggtgaggaagtggatgtggtggtgggacgatgtggaagttcccttctgattaatcagcacatgtttctggaagatttctgattaagaatgccttgccagtgctgtttcaggtcaaagttgattatttttgttaatttaatttctatgtaagtctcactaataatgcactgtttttaagtatataaagtactaatattccatgttgtatagctctttcactggcatagtttctccatgaggaaactgaggcacagagagacaatcatttgtcaagggacacataacaactctgctgccattttctcctgacttatgatataacaggcagctcctactggccttttgaatgtttttcttgatttaggagtctgggggttcccaaataagagattttatttttaaagacttgatgggattatgtcaattttaaaaatcaataaaagaactagaaagatgaataagaagaatataactcctttcttctcataaattttatttttaagtgtcaaaacacgcaatttcttttcagatactgaaacctgtgatattatgtgccctttgcctactgcaatcgctttctgaatagtcaagtgattcagcgattacctctgtgcacccaaatcctacctgattggaaggaagtcaccggggaggggatggtgagatgacgcactaaagtaaaactccttgtttgtaaaaggtgaataaaaaccacttttgtgttactcatagagactgaattgagatcaactttaaaacatattttgaagaatttccagcttcatagaattaaagtggttaattatagacaataacataagagaaagagaagcttgttgagtgaggattctccaccacattttctcaaggacttcaacctttggctcactcttcctccatacccatattctgccatgatccttagtgactccaacgtccaacacaaaatgtcaccaccgttcagctcatccctcagcatagcttgtaactcatcagcattcagagatgctctccttcaaatatcttgagcattaaatttaccttagttgatccacattgcctcatacttaccaactttcttgtacatcctgaacctacttctcttcttcctgacttccagacccttgacccttccccacccttcactggccctgctccatcccattcctgcttctagccataatccatttcaagggtgttcttaatagctacggtgcactttcattctccatgctctgctagtttcccacattggcaatgatctccactgttggtctatgccatacaactcagaattgcttcattcatctcaggcaaaccccctttcagattctctatagtgctgtgttctgaacccttaacatgctcttgagaccacagttctacctttcactgaaggtcttttctccactatgttgagacattggaggatgtctgtcaggggttctcattcttttcttcccctcacccttcacagctttacccagccctccatcttccttcctgacccagaaggttcccctcctttctaagggtgagccatcaaggtctaccagaaccttgctctgtgaacgatctcctctcttcaatgtctcttcctcagtgattccccctttggcctgcaaacatgctacacacaaatgatttttttttcagttatctagacttttcagactccttgaatgattattccccttctctttcttggtgaatcctatggaatatgtactcagcgcttttggctcctactgccttacccgctgttttatgacctccgcctccctttctggctttacctccattccccacatgactcgtcctcaggccaatgcacatccccagctccctaccttctatctccatttcttcctccttctttgccttccccccaaaaaattctttaagggttattctccatggagccttcttgaggcagcacttctacaaatccatgctatctttctacccaactcttatttttttctatttttactgagatacaattgacatatggtaaaatgcacccagcttgatgagtttggataattatgtaacctgggtgaccaccacccaaataaagacagaacatttccagcaccccagacattttcccagttctacttttcagtcaactgccaacttcaccaagagacaacactattctgatttctattaccagatattagtttttcctgtgcttgaacttcatataaatggactcacacacgggtatgtatcatatttagcactgcatactgtttctgagattcatccacgctgttgcatttatcaataattcattctttttgattgctgagtactattccattatataaatacaccacagtttgtttatccattttcctgttaaatgcatatttaactttttttcagtttttggcatttatgagtagagctactatgtacgtacttatacaagtgtgcaagttttattttctttcttggaaaaatatctaggagtgggattgccaggtcacaggttaaatatatgtttaactttctaagaagctgtcaaactattttccaaagtggtttttaccccttttcattcttcacatcccaccagcagtgtgcatggagtctggttgctccacatccatcccctacttctgtgtcctccttcttggctttttttggcatcactgcctatattcttagagcatcttatctcatctcccctccacttgagcttctgagggactgcagttgtgccttcatcatctctgcacccccacactctagccttccttaaagctctaaatttgtacagaataggataatatggaatccagcgaaggagccagggattcgggagttctgtacaaacaaccaagtggcccaaccaaatcaatatgatccgactcacccagcagtgtattacagtattgcagcttgaatgtggggctcctgcggccatttgtcacagtcttcaggaaaggctttttatcagattcatagtggcaagtgatacaaattattggatttcttttccaacataaaaaatagctatttgcagccttttgaagctgggtaaatgagccattgatcttacctgtggaacaccgcagggtatttttgtccatcctaactttcaatattctatgatgggagcccacccctccagccaagctggtctaatcattattccttgggtgtgcctgatctgtatcctcctccataccttttcccacaatgtagagaaaatttttagtggaaatgtcctcccttttcctcctcctagaagctgtcttcaaggcctggcacaaatgccagtacgtctatgaaggcttcccagctgcatcatcctgtagtaactcttctctcccatgaattattacaaccttcccaggatgagatgacggcctccctcatagcttcctggacttctaaatagaaagaggaatctgagaacagaagagagctccctaaatgacaagtgtaccccagatgtctgtggccatgtcccagagggccagctgcaatgcagggcctctcttttgatgtcccttgttcacaacgagccatttcacttctagtcaggactatctgcctcctaccatcatcttgaagcaataaattgcttcagactgtgtttcatcacttaccagtcagtcaagagcttgggttgcattcaagagcacatgttagagcattctgtctgctgagtgtgtgggaaggcacagagtaacatggccctgcctcatgtcgtcagtgcaggatgctcatttccaagggggacaagaaacattcagcttaaatttggtaaatatcttgaacaaaacaagaggagtctaaaaaccctccaggtttcttttctcttattctgtctcactctctgtcaaagcaaaccagcacctggtctgtttcttcatatgctctgggatatcttcctgaagaacagcctgaaaagcagagtcttctcttgccattgtccacactgatctccaggaaatccttcatctttaaccctggaaaatggcagctggagaaccaaggaataccaccctcccatgcttccttattttccctttccagctttggtactccactctgtcctcacctcccatttcctataaaatatgtttattcattaaaaagtatttaatgccttattttttattatttttattttttttttatttttttttttgctaagacactgtggtaagaattagaagtccaacaacagacaagatgaaaacagtgtctacttctggggcttatattttactaggagatatagacactcaacgagtcatctacaaaagagtatcctgactgccatcttagtaaaagtacaaggactgtgggcatatgagaggggcaaagaggccaagctcaggacatctgggaaggcctcagagaagaactgacccataagctgatgagagttacccagaagtcagctggaagccatgagggtggcatggcacagaggacatgggtgggggcacccagcaactgagagcatggcacaataaggaagcagtggcaggtatgagagggagtggtgaagacaaagctgaaaagggcagcaaggatattcccatcacaggcctttcttgtacgttctaagaaagagtagggacttatagcaaaggggagccatttataagctcacacaggggaatgagggcatcccttttgtgtttgcaaaggccgtgctgcagcagcactgacagcatggatcagagggcaacactggacaggcgggaagacagaggagacatgacaatggcttccatgaggggaggggcagtgctgatggcgtacatggaggcactagtgatgtcacggagaggaaggagtaaaggatggggctctggtttcaggcttgcgcctctgggataatcgtagcacacccacagaagttgggaagactagaagctgcagatctagggacagagggaagccatttcggggatagtttgctgtgtatctgggcctcaggagaggcctggaccattggggtcacaaatcatcaaaactttgctagtcatgctgccctgggagtgggttagacagcccaggagaagaggagggatgctaaggagcaggcaggtaaagagaagcccatggagaagactgcggggccatcagcgagtgggggcaaccaggagagaggctaccatgacagggcttggggaagagttttgcaaggaaggcagatgatcaagcaggtccagtgtcccagaaagacctttttttgtttttgagacaagtcctgtgctgtcgcccaggctggaacctcaagaggcttggctctgaagggaggagacagagagagcagcagcaggagaagggtgtggggtaaaagaatgggttggtttaagacaggaggaacataaacaggactttaatgtgttttagaatgaagaggatgagtgaatgaatgtttggtgagaagcaattacaggatataaagcaaataattagaatataggcacagtgtttactgacttaaacacttaacaacaaaattatatgatagtggactgaatcctcagtttgcaaaacagagaattcagttccatgtggtggaggcagcatagtgagcaggttctggagcaaacctctgtggtgcattcccagttgagggtggctaagggcaagtgacctaatctctctaccagaaatggagataatcacacccatctctcaggcaacaacaactgagctcagttagagcgcaacaaatgtcagctctaatcagctactgaaacctaacattaagggaataaaacgtatctggtggatactcacccagtctgctaaaggtacagaaaaatgtgttcatgtgctgttgatttctaaactgctgaaactcagaccagtcctcaagagctgggcctgttccaactgtggaaacacttagggtttgtattgtttggctacaacgtgggcagcagagtgtccatcacgaaggccatgtgtgcacagccaagaaaactcttttaggttcctacctgtctctttccagagccatccctctggatttcagatgagatttccctattaaggagggatgccaaatgctggggatttcataatactcccaaccccaggcaccagatttgtgtaattgcagtggtggagatttaattgtcctttgaagaggccccatactgtttgtctgtcaaattgtctgcatgttggtgcagttgaaattataggagaagaggaaaccaggggtatgtttcaaagtagttggcacgtggttggtgatccatagtgcaggtttcctttctggaaggtaacaggactgtgttctcataaggcagcatggcagggtggaagccatatgggatttgccctcgaatttcagcgctgccgttgagcagctgtatgaacttgagctatttgcatatcttcttgaacttttttgctcctctgtgaatgaagccattgcaccagcatgttttcaggattaagtgagacaatatgtggaagtgcctggcacacagtaggtgttcagtatttttttattttccattctctgtgtccttgttttgactaccaggtaactatgtttaccctcagagatctgatgtatttcttcatatcaagtatatatcaagaatttcatccctcatcctaatgcattaaactcactgcatggaagttataccattacctagactcaccacggtcttgtcagacaccagcagagttttgtgtggctgcaatagagatgttattgccagttgtcagtattgaaatgaggcactccttcatccttcagtgaaatctgtgcaggcattttcctttctctggttaaacattttatagtctcctttaaaaacaatgccctcatttcatttcctctctctggctggactcttctcctccctcctgctttcctaaaatccatcttgtttccctgtattgtttgctgaatgggcagtttaatgaatacagcatttccattttgaaatgtacagagcacaaggcagaaactgaatttcctcctggacagtttccatccacagtcctcatttccagttttctcccttcttttcttttctacaacacaactgaaatttgctgaaccagaaaggggaggaaggaggtgtgacaggagaggcaatatgccttctcattgtttcagcaaaagcttattagcatcctgctccctagaagagaccaagtgccctaaagatgccctgggtgcctcttctattgcacaaagctcaaggtccagagtatacagtgcatgacagaatctaattaccaagataattactgttacctgcactacctaactgttgtgttttgtaatcaaaagctatattggcaggggtgagtgtgagcctgctgaaaactcagggaaactgttgaaggtttatcaacccgaagcaattttactctagttagtgggcctgtgttgctcagttagcagaatgtttggggatcagaagaataccccagagcacttcagccattgcatagacattagttaccgggtaggaatatcctcagctgactcaggtattcatgttgttgaaaccagacttcatggcaatttgaaaacgtctgtgccatttttaaatttgttctcgaaatagttgatcagtacctgacttagccttcatttggcattcggtgaaggagaaattgatttcctttgggcatggctgtatgtacctgatgggtacagcgtgtgctaagctggatgtaggtatgtattcatactatcaccacctgcttcatattcattatggcacaaggttacaaattggctttctgtttcccatctcagccagctctagttaatttatgtctttacctctgtgcttcacacactaaagaaatggagtttctactttaaaaatcaggtgtattgaaaaaatggttataattgtttttttaaatttttaaagaaattccaagtggaaaacaaggaataagttgcaaaagagtatgaaaagtttggtaataaaggcaaggacacttaaaaggagggagtaaaataacaaagcaaaatgggtgaggctgacaggctataaattgaaaagggagaaggggtcaaggaaaatgcagacaggaagaaaagagacagaaaaagaaatgatagggccttgagtaatggactcagaaaaggaaataggaaaagttaagaccaaagtaagaattatggagacaaaagtcaaagacatccaggtctcaagaattacaggttattggtggcctgggaggtagtgaagaggggctaggcatatccctcatgaagttagatgtctgaattcctcaggacagtgtgacagtcagggagaatgtcccctgaatatgctaattcagactctaaaataagagccagccagattcattaccatggttggccagcctgtaatggcaacagaattcactgatgcatattaaactgaatttttctaaccaaggtcttaaataaacagacaccagctataactgaaaattagaataaggccttcagtggtgactatttctgtagggaaagtctgaaaacccttaacatggtttttttccaaatttttagaaatttgtggttcttaaggctgcttagtatgttagcaattgctccagtgcaggactgtgtggatccctctggtattttcttttaactttctgcaaggcagagagtgtggctgacctgtgatataaatgaaaccccgtggcaggaacattaactccatctacaacaaaggaacatgtagagatttggattctaatgaaaataatagaagctccttctcccaaagttgggaaatacagaggaggtcttctcagccagtccaaatttgcaaaaccagaatcatcacagaaaggtagataataggaggcctaagagaaagctcagttgtcctttggcctatggcctttgggcttgctgtagatcctctgttggcaactggatgctctgttgggtccaggaattgatgataaccagtagtttgtgggtagatttccatgttgagcactgccttcagctaagtgctttcagttgcctcttgttatggttggagctgaatgacctttgtttacgtgtgtttcaggctaactgatgaattacaagattttcaccaatgagtgggaaatgtagcgataattattcagactgatttatatttgtctttgggctggtttttcatgtatatttttagacattttaatatatttggatctgattttttataaaatcatgaggttctctttatgctcaagtgctgccaagaagttggacagccctcctgttcttctcccagttccccagtccctattccagatgaggggatgcagagttagttgtcaattcattcaacaaacatttattcagcagttagagtgactatctcatctcagtttccctgagacttttctggtttgagcactgaaaagttctatattctaggaaactcctcaacctcaggccagccaagacagttggttaccttatcatctaccatgttccaatagagctaggagagaccctagaaatcatgacaatttctttattattattaattactttttaatattcttcttttttttgagacaggatcttgccctgtacccaggcttgagtacagtggtgcaaccacatctcattacagtctccacctcccaggctcaagcaatccccctgcctcagcctcccaagtagcttggactacaggcatgtgccatcacacctggctaattttttatttttatttttttgtagagacgaggtctcatcatgttgcccaggctggtctcaaacttccagtctcaagcaattatcctgtcttgatgatttaaattcaaagaaacctagcttcccaaagtgccaggattacaggcacgagccacagtgcccagcccattctgatttctacacacccattttaaagtgccagttaaagccaaggagacctctttatcaatttgttttccttctgattcacacattccctggattggaagagataattaagttctatggttgaagatgttatcttcaggctgcattaaagaataaaattaaataaaaggtcatgcagtgtgccaataagagttttacaagccagttggaatttgaaaattagagagtcaaaaagataaagtgaatcaaaaatcatttatttagtattgaggtaccttttggtacatcaaagagatcatttataaaatagtataatgtaaggaagttgaaagaatgaactacagtggaatactattattatatctacttatgcctttttttctggaaaatgttcacaatgatgtgaaaggatctaagaccagcctggcagccaccagatggtgattctagtcctggctcagtcagtaataggtcactgaccccagagaaatcaattcagcctccccaggtccttggatttctttctgtgaaaatgaaagcataggtaggaatttcccatggaacagctagcagaggagaaatattaaaagtcaggagactcatgctatagttttcatacttcattacaacaatgttgtttaggacaagtgagttaacctgttagcttcctctatataaaatggaaagtcattaaaaacctacatagcagggttcttgtgaagatcaagtgataatgtaggaagcatgtacaaatgtcacattctgccgtcacgtaatggtcctcacagcttgaggtagcatttagcatgtgtcatgatttagtacaagggttggcaaactgttgctcttggattaagtctggctcattgcctgtttttcaaagaaaaaaattgtatatgtgtgtatatatgttatatataggtacacacacatatgtgctatatatagcatatatacacacataatatataaacatgtacatatatagcattatatatatacgtgtataatatctccagtcctcatgaccagccatgcttgttcatttacatttgcatactctatgattgctttcatgcaacaatggcagagttgagtgattgttttgcaacagagactgtatggcccactaaacctaaaatatttagtctctgaccctgaaatgtaagattgatagcccaggaccaggcgtggtggctcacacttgtaatcctagcactttggcaggccaaggagggtggatcacctgaggtcaggagttaaagaccagcctggccaacatggtgaaaccctgactctactaaaaatacagaaattagctgggcgtggtaatgggtgcctgcaatccaagctactctggaggctgaggcaggagaatcacttgaacccaggaggcagaagttacagtgagctgagatggtgccactgcactccagcctggacgacagagtgagactccatctcaaaaaaaaaaaaaaaaaaaaaagatagtccaagatccaggattcttttaggttctgtgtcactatgtgatctcaggttaatgatttattgtttctgattctgtttcttacactgtaaaaaaaaaaaaaatggtgggggggaatacaaatccagccccttctttcctcacagaaatgttgttaagatagataagaaaacaaaatcattgatctcttctggaggaaagatgatttaaattcaaagtattactcataaggtggatgctgttagatgactcagaaatgatgactgatgtgttattattattctctgaaattagttccctcatgtacctcagtgggggattacttagaacagcgatagcatacagacccctgcatcgtgacactacatcaaaagctaagatactgcaccagaatctaatttaatcacagtacccagtcaggagtgagttttaattgtttctttatccctttatcctctgaagactgtcattaacatttacaagacatgaacttcagatcatgccaacatctctgctgaggtcacctggcagctagccattttagtccatgatcaagacagaggggccttctgggcacatgaggagggacaagacagaacagtagtggtggtagcacataagctggtttacagagcaaataccaaagataggcttgtttctgttaaaacttgaatttatattttattcttggacacatgactgatatccaggctgactaagaacatacacaagtaaataacaaaactttgtctaacacgtataaatattaggacctcctttttccccaagaatcccctcaaacctctagggaggatctccctaaaggagcagctcttcatgtggctgaaagcagccacataaggaggctaaggctggcctctgaaagttacctcggcccaggtgcagcccatttatagaccctctatacccaactccagatttatggcatagataaattagtgggcaatcatttgctctataaaatgattcttcattttacaagcttattcactgccgcattcctttactgatctattcctttactgatctattcctttactgatccctctatacacaactccagatttatggcacagataaattagtgggcaatcatttgctctataaaatgattcttcattttacaagtttattcactgccacattcctttactgatctattgccactagtgcagttccaataaaatctcattgttagaaatccagtacacaaatgctttttcactgctaacctggatggaaagatgaagaatacaatgcacttataatccccttagatcttatgatgtggctttggtcaaagtcttctgttctcagtttaggagcttaatgttccttggtacttacaattgacagggagagacaggacaaaagattctttaaaataacaatgaaacaatatgtgatttcattaactaacttgctctaattatctgcatgagatttttaataaaaggatcagtcatacagaaataagctaactggccttttgatgatgagtaataatgatactgacaatagctaccatattgagcattaccatgtgccccatagcattctaactcattaactcattgaagctaaaacctaaaaggtaagtataattattttcatttctgtattacagatgaagaaattaaggcacagagaagtaaaatatcctacctcatgtcacaagctgctatatttggagtcaatattcaaactcagtggcactgactttataattttgctactaaatagttacagtgctgtattgacaagtaaagcaactgtcaggtgctgaaatgtaggagcaagagcaatacataacatgtgttctaccttcaagaaactaataagaatttctgcctcaggccattagagaaaaactggtttgggacttgtcctttgccataaaatgaaagaaaaaaggaaaactggacaaaatatatcaaacaactaatttcataccttggacaacaggaaggttgttgttggacaacaggaagccaaagtggaaagaacttgttgggtatatagtaaattgaacagagaccctagaagggccttggtgtaatagtaaggctaaactagccctagaatcaagattattttagactcactctggtaaaacttaaaaacaagacttgaaaggatcaagtacatctagagctgccaaaacaatagccaacactttttaaaggaaaaaaagacaatctagacagacactcaacatgtaaaatttattatatctatcattcaatcaaaaattactagacatgtaaagaagcaagaaaatatgacccacaactagaacacccactgaagagaagcagacctagaaatgatagtgatgatgaaatttgtagacaggcactataagcaactattatacatatattcaaggatttaagagaaatcagaaacataatgaaaagagaaatggaaactatagaaaaggaatcaaatgtaattctataactgaaaaatacaatatatgaaataaaaaaattcaccttatgggctcaacagtagattagatactgccaaataaaagatacatgaactcgaaaagatagtgatagaagcaattcaaactgaagataaaatgaggctgaagataaaaaggctcttgtaaaaataagaacagagtctcatttttaaataaaaataaacagagtctccatgacctgtgggacaacatcaagcagactaacatatatgtaaatggagtcccagaaaatgtcagggtaatggcaaaaaaacctgaggaattaatgactacaatttttccaaatgtaataacaactataaactgacatatccaagaaactcaataaaacccaagcatgataagcgacaagaaaatcattacaatcaactagtcagaaagcagcaatacaaaaaaaacttaaaagcctccagagagttgaaacacattatataaaaaagaaaaagatgagaataatcactgatgttttttgagaaaatgcaatgtcttgtagaagacaatgggtgacatctttaaagtgcgtgaacaaaaatctgcccacctagaattctataatcagcaaaaatattcctcaaaaataagaatgaaattaagaattttttagacaaacaaaatttgatgagcaattttttcaccactctaagaaatgtcgaagggaatttatcaagtcaaaataaaataatgggaactcagatttgcacaaaagagaaaagtttctaaattaataaatatgtaagctgggtgtggtggcttatgcctgtaatcccagcactttgggaggccaaggcacgcggatcattgaggtccggagtttgagaacaggctgaccaacaagctgaaatcgcatctctactaaagatacataaattagccggacatggtggcgtgcacctgtaatcccagcttctcagcagcctgaggcaggagaatcgcttgaacccaggaggcagaggtttcagtgagccaatatcacaccactgtactccagcctgggcaacagagtgaaactctgtctcaataaaataaaataaaataaaataaaataaaataaaataaaataaataaaataaaataaaataaaataaaataaaataaaataaaataaaataaaattaaaataaaataaaataaaatataaaataaaataaaataaaataaataaaataaaataaaataaataaaataaaataaaataaaaaaaataaaataaaataaataaaataaaataaaataaataaaataaaataaaataaaataaataaaataaaataaaataaaataaataaaataaaataaaataaaataaaatataaaataaaataaaataaaataaaataaaaaataaaataaaataaaataaaataaaataaataaaataaaataaaaataaaataaaataaaatagtgagtaaatataaaaggcattttggtttttaaaatagcttgaaaagtaaatggactgttcaaataaaaaataataaagatataataatgatataataggaaaaaatatatgataatagcataaaagaaaagagaataagtggaagtatactattgtagaattcttaaatatatgaagtacatatctaatgaagactgtgatagttaaaatgcatattgtaaatgctagagcaaccatttttaaaaaatggtatagccaataagccatagaaaagatgagatggaatttgaaaagaaaaacctcatatgaaatgaaaggaagaaaggaacagtgaaagaataaagaataaggtacaaaaaaatcaagatgatataatacaaactcaatatatcagtaattacattaggcataaatagactaaccatgccccattaaaagacagaaatcgtcaaactgaataaaaaaagcaagattcagttatatgctatttacaaaaaaaatattttaaatataaaaatagctaggttagatataaatggatagaaaaagatatacagcaaattctgtatacgtgaaggctgtcataattgtactatctgaaaaagttggcttcaaaatagagaacattattagagaggaggagggacattttataatggtaaaataatctattcatcaataagacacagtgatcttaaaagtaaattcactcgccgaggtgggcagatcacaacaaggtcaggagtttgagaccagcctggccaacatggtgaaaccccatctctactaaagaaaaacaaaaattagatggacttggtggtggacacctgtaatcccagctgctctggaggctgaggcaggagaatcgtttgagctggggaggtggaggttgcagtgagccgagattgcaccattgcactccagcctgggcgacagagcaagactccgtctcaaaaaaaaaaaaaaaaaaaaaaaaaagtaaattcattcaattacaagctttgaaaactacatgaagaaaaaactgacagaattgaaagaatacacacatctatagttgtggctggaaatttcaacacttctcagcagttgttagaacaagtagctggaaagtctggatatggaagattcaaacaatactatcaatcaacttgatcaaattgatattacagaacactgcattcaacaacagcagggtgtacattctttttaagtgcacatggggtattcaccatgatagactatatgctgggttataaaagcttctcaacaaatttaaaaggattaaaattatatgaggtctgtttgttgaccaccatggaattgggtaagaagtcaaaagcattaagatatcaagaaaattcccaaatacttggaaattaaatatcacacttctaaataagccatagatcaaagaagaaatcaccaggaaattagaatttatttgaaccttattgataataaaaacacaatatatcccagtgtatgggatgaagctaaagcagtgcttagatggaaatgtgtaggttaaatgcttatgttagaaaagaagaaagttctaaaatcagtgatctagcttccacattaagaagctaacaacaacaacaaaaatactaaccttaagtacgtagaaaaaagtagaaatcaatgaaatagaaaataataaataatagagaaaatcaatgaattttaaaacggactttttgaaacaaagctataaaactgataaactatcaagctggtcaagaaaaaagagaagatgcaaactggcaatctcaggtgtgaaacaggacacatgactacacatacgtcattaaaagggcactaaaggactctaatgaacaaacatatacaaaaaattcaacaacgcagatgacatgcataaattccttaaaagacaaattgctaatactgattcaagaagaaataaaaaacctaaatactcctataaattaaatgaattgaattcataagtaaaagcctttactcaaagaaaaccccaggcccaggtagttccctaattaattctgtgaaccatttaaaggataaataataacatgactatgcaaactttaagaaaacagagaaagaggtaaatacttcccaactcattttataaggcgtgtatgacactgatatcaaaaccaaagatatggtaagaaaactatagaccaatatccttcataaatatagacacaaaaattcttaacaaaatataagcaaattaaattcagccatatgtaaactggataatatactatgttcaagtggcatttatcttagaaatttaaggttggtttaatatttttaaatcgatcaatataatttaccacattaacataataaaggaaagagtatgatcatttcaggaggtgcataaaaagcattgcacaaaattcaacacccattcataataatgacttttggaaaattaggaatagtgacagcttcctcgacctgttaaaaggcagtgatgtcaaatcttcagtttaattatgaaagagtgaatgctttcctactacgatggggaataagacaaagattcccgttctcaccacttctatttaaacatcatattgcaagtaccaactagtataattagacaagataaagaaatcaaagattacagattgcaaaggaagtagtaaaattattattatgaataaacaacagaattgtgtactgtcaacctaaataactaaaagagaggggctctgtgaaagaaagatgtttatctgggaatagagctttgcaatggaaatacctaggctgtagttaactatgtgtgtattcagggaggtaaaggaagacaaagctttttcaaggaaaaaatgaggaagattacataattgttttaaaataattatccttgactacaaagatcaataagaagggtgcgatgggtacgctaaaagcccagacctcacaactgcacaatatatacacgtcttctgcacttgtacccactaaccctataatttaaaaaaataataataaaaaatagcaagagtgacaccttctgaggttggacaggtagctgctgggcagatgtacttacagaagtaagttttatgcaaagtcttgatggtctctgtgcaaagttgtggttttagcggtcttttttgttatcaggcatgcaagcatgagaaccctctcttcgtgaccttccctagctgtatttgtttgggttttcataacatttatgccttcatttttattctgataactttcacagtacatagaaaatcctaagaaaactacaaacatatgctgctagaagcaagaagtaaacttagcaaggtcacaatatacaaaattaaagtttatgtctgtatactaaaaactagcaaataatattttaaaaaataacatcaaagaacatgaaatactcaagaataattttaataaaatacatgtaaaatttaggagatttttaagcagacttaaataaatgaaagaaaaattttgaaaaggagaaaaaaaatttgaggacttactctgatttcaaaaactttcatctacaataatcaaagtcatgtggtattggcatattggcataagaatagacagatcagtggaatagaataggtctatgcgtatatggtcacttaattttttacaaaagtacaaggttattcaacgggaaaaggatagtctttacaacaaatagtgttaaaacagatatccttaaggggaaaaaaatgaaccttagcccttatctcataccctgcacaaaaattaactcaaaatggatcataaacctaaatgtaaaatcttaaactatgataattatagaagaaaatataggagaaaaatcttttgacctcaggttaggtaaagatttcttagattactaaaggaactaaccatttaaagaaattgataagttggacatcatcgtaagtaaaatttccactctttggaagatatcattaagaaaatgaaaggcaagccacagaggagaaaatacaatacatacgtctgacaaaggacttgtaactctcacaactcaattaaaaggagactaacaagaaaaaatgagcaaaatattttaacaaacatttcacaaacaagatacaccaatccccagtaagtacatgaaaaggtgcttgagatcattagtcatcattgaaatacaaattaaggctaggtgtggtggctcccaacactttgggaggccaaggccagcagatcacttgaggtcaggagtttgagaccagcctggccaacatggtgaaacccccatctctacaaaaaatacaaaaattagccaggcgtggtggcacgcacctgtagtcccagctactcaggaggctgaggcacgggaattacttgaacctgggaagtgaaggctgcagtaagccgagatttcgccactgcactccagcgtgggtgacagagcaagactccatcccaaaaaaaatgaaaaaaagaaaaagaaatacaaattaaaaccaagacaagacattgctaacattcactaaaatgtccaaaacaaacaaactatgcaataatgtggatgaattcccaaatcattatgctgagcaaaagaagccagacacaagagatcacactgtatgattcctttcaggcaaaagtataggaaaggcaagcctaatcaatagtgacaggaatcaaaccaatggttgcccgagacgggggtgggaaggaatggactgaaaaggaccatgagtgaatttttaggagtgatggaaatgttctgtgtcttattgctgtagtagtcacacaggtgtgttcattcgccaaaacttgtcaaatatacacttagaatgagtattttctattctattcaaattttgcataaaaagaagcagctattttgttgttcatgatagaagcaatattagcacttactgttctctagctctttcccaaggttttgcagcactatgaattcctttagtcactcagagaattaggaaattagcatgggttgttttgatctgattgggcatcacaataggaactgacctttctgtcttctgagctctaactttggatctcatgttttgctcctggtgtgtaagtcctagctctcctatttgggcctccttaagggtgggtgcttggtgcaactgtcatagtcctttgcttaaaactttctccttggccaggcacagtggctcaagcctgtaatcccagcactttgggaggccaaggcaggtggatcacctgaggttaggagttcaagaccagcctggccaactcggtgaaacctcgtttctactaaaaatacaaaaattagccaggtgtggtagcaggcacctgtaatcccagctactcaggaggctgaggcaggagaatcgcttgaacctgggaggtggaggttgcagtgagccgagatggtgccgttgcactccagcctgggcaacagagcgaaactctgtctcaaaaaaacaaacaaacaaacagaaaaaactttctcctcagcttattttacgaacatagttgtaagttgaatgaatgcacgcctggagagcaattgggatgcactactgtggaaagtagaggtattcagaaaaggctcaacagccatatattagggatattatgaagtgatttaaacattagatgatggttggactagagaagttctttcccagtcctgattatgtgaaaagaaagcttccaagggcaggagacatttctccacagggggaagtgagtctaaatattaggagggtcagtagccattctgacaacctacccaccatagacagagtgggattcacccctaaaccagcagagtggttagatgtctgtcaccaggcatgtgggtctgaatcagaagaaagagaaggatatcattttggaaatttacaagtgagacatgaaatctaatagaagggatttcaaaaagcacagattcatatgagaagttccctggaaagaaaagatgggtgctgatgtgggcaggggccatctgaggatggcagcttcacagaattgccctctcactccactctggggccaggactccccactcctgtagtcttctccctaagatgagtaaatatgaattcagcaccaagtaaaacggcctacacatcctctcaccagactcttttgcttataatcatcattattaccttaaagccaaagtttactcatctgtaaaatgaggataataataattatagaatcattgtgaggctttgataagataatgcctgtaagtgtttagtacaggctcatagaaagtacttagtaaatcctggctatgattgtggttatgattttgttacttgtttcatcattaaaccatgtatcatttactccggaaacaaaaagtaggaatgctatttcccaatctctgtaccacgctcacagcgaaacagcctgtgccatccactaacatacccataaacaatctccactgcattacaatcaggaacttagggaaaatgaggcttttttcttgttaagctttatctgcagaatctcaagtagtttttagctgtgctcttttatattccagtcaacctcatttccacagatgtactcccctagattgaaagttccgtgagagcaggcatctggtaaattatgcccaccactctttccccagggcctagcaaggtacttggcacttagtgggagctcagtagatataagatgaatgaatatggtgccctttccaaaatccttctacgcaagtcctgctgcactagtcgctgccctgctatggatgcaaaaatgagtgaaaggttgatacattgtaaacgtaactgtgatcattctgagtagtcatttaacctctttacagcagctggatgattatttctcagctatacgaaattattaaataagaaataattcatgcttcatgttccatgtcctccatcatgaggcctttttaccagtttaattagttagtaaaggacagcacgctttcctctccaccttttatcaagaattctaaaggctttagagaaaaaatgactcaggaggtgaaacagcaggactcctggtgttatttataaactcgtccctggcatctgcagcagcaaatctcaagcatcgtttaccttgccccgtaattctggagtttgagtataaatgatgaaacagctaatggcatgttacccgacaaagtagcattagcttcctctatcatcgtcagctgttttttttttttttttttttttccacaaaaatgtgtaaattgcagtttatctcaccagagaagcatttgatcaaatgtactttaattatattttgtgtggctactgagaataatcactgtttcttcatcataaggattgtcctaaaaaattatattaacgtgggtcaaccataaacagcagtgggaatttagctacctttaaatgctaaatttacctctcagcttgtagatttcctacaaatgaatttctttgggtcaagattttttcatgagcattggcaattagtggatattccttgaaccaaccttttactttaagtgaaatgtatttgcattaagagcatattcatttcccaggctgcttcttaacacatttgtttccctttgttttggaattcacaaagcttttcatggtttgcctattcattccctcactgcataatgatttatagtaggttatattttagaaggttttgtgtcaaaaaaaaaaatttgcatctcttcatcaggtagtcagttaaagaggctgcgttgagctgccaaatgggacgctgccaggtgaccaagaaagaaaagcctacttgcataaataaaacgaaagcatattagaacatttagctaacattcacccaatttttcatagttggcaacttctaactttgtttcatcttcaaggattatggtttgaagcaagggtaattcgccttgtgtcttccttttagttcttccctcagaacctggtttgggaaaaacctcactaatattttgtagcatcagccaagtagttgtcatcttttttgtaaccaactgccttatacaaaagcatagacacacttattttggataaatccatactgtctgacacataagcaaatatggaaaatataaaggaatccaaaggctctcacacagatcaattttcttcattggccagagctgcctctaaagaaattcacatgacaccgtcttcatttttctgaacatgatacatattattcattagcatttaagcttatatctaatgcacatttttagataggattttttagtagtaagacttttttatatgtctacctattattatccatggtagagtttcttgtgaccttgaccctgtgatatctggaaatgaaaaaagcccattttgtttcagactcttggtccctctagctataattctacttctgacagtggcccccagaggcattttgtggagggctgctgccactttgacatcacccctaaaattgttgggcacaccctctctaaaataattttatttctcattatagcttaatcactatgaatttctactagagtcatttaaaagaacaattttagcctgccctacttgttgggaagaataggggaaattaacagcatcttgtaactggaaggacccttataggttcctaagactgattccaattccaaacaataataccagtccgtaagtggatctgcttatagagaaacacctgttgcttctgttttttgtctcatatccagttagtttcccattcacagcaaaacattcccttcaatgccaaggaaactcaacctttttgattattagtatagtttcatcaaagtttctttgaaaggtaaaatatcccctttttcttgcctataatttttaaacctttttaaaggttgtaaagaattagttagtcaaggcttcttctcataaagccagggtttcttttttcctagactctatgtgcttaagtgctctatgataaaatgtggatgttataaactcatcagcttggccatgtggaagtgaaaaccactggtcagaggtgtgtggattctcccttgtgacctatctcatattactgtgaaccagctggcccccaataccataagcattaacaatggctgacaaaattgggactccagctccattgtgtcacctgggcatctgtgcagcactcctgccaaacagtcctgctaaactattccgatttcagatgggaatttggtcagaaacagcattttcttgtaatacttcccacttttctaattcccttgtttctggttgccaaaagaatgggaggtagacaggaagaggtggggaaaaatgtttaagttcaaatgtcatctctgctaaaacctgacttccactgcactgtggctttgtaacctccttgtgtttgtagccagctatcaaaaatctgtccatttgaacatgattatactaaagcatgattattttaaagctttcattataaactctacactggaaataatctttagggtgttttcaggtttgaaaacccatatgcactgaatgttctcatggtgtgctctgtcagaaacaatttttaatgatgtttcctcagtgagcatcattccctagatgtggacagagctgcagaaaggcatttacaaggagtcatgctggctcagatgggtgaagagggaactttattgacgtcagaccatgaaaagagagtgggcaataaattctgtatagacaaaggtgaacacaataaactgagactgacatataaacacgagtacaattcaaaatacagtggtaaggaggtgtggatgtttctttatagctgtatatgtttttgacacacccgcacacacagaaaattataaagtcaaagataatgaacctagagtcatgtggaaggtgtgaggtgggtcaagggagaaatagaggttattaaggagtataggtaggtattgaagaagagcctcattttatacacatacagacacatgcacacatatatacctatatatactctctctccatatatacatatatttatatttatgcacatgtaaatacatatatgtaatttatatttattttcccccaatactcctcatacctagagaccatgaactacatacagagggaaggcacactttctacctgaaggccagcccttatattggtgatcagtttgttcagtgctcttaatcattagagtaattgtgtataaaatcatgaatggggactttgtgagtcacttaacatttgcaagaagcatatgaacgtgattgttcttttagagtttgttaggtgggtggtggtaaagtaatacaattttctaaatggtaaaatcatgaatctcatgcatgtcaaaaaatttattcaattcattaattaatgagaatatcagtaagatgttacaccattttaaagagcatttgagaaaccaagtctgtgcaacttaataaatatatattaggataaaattgctgggttagataaaaactggttaatgtcttagaagccaataaactgtaacatttgagatatctgttctatgggacaaaattcattttcatctcttttagacatctttaagttgacatgtaacttcactaaatctgggacctttaatcaacagtaagcagtgagtcaaaataagtacattctaataaataatctttgggtggacttggcccctgaatgacattgaaagaatgtactgcctacctttttgctttatttttaagtcatgaataatttttataagagtggtgaaaggtataagaacatactgagttctacataatagtgtttggatctcaacttgtatactgctatatgttcacatggttttggtaaggagaactgacttgtcattctccaaggcagaagctgagagtagaactcccagaaagtgggatttacttaccataagttgctgtagaaaaggaggatggagtcaatctttatttctgcttttgtcccactacatgttaagaattttttcatttacccattcagtgattcaacaaatatctgttaagcatccactaagtgccaggcattgaggattggggtgaaaaagcccctgctcttaaggagcttacattctagcagaaaagacagacaacaataataaaaccatgataatattgtttcaactggtagatagtgctatgaaaaagaaaaagaagcagcagcatgaaggtaagggagataatgagtgaccacatggaggggtggactttagactgaacgatcagggagtcccaggaggactggcaggcctgcagagtgtggcccggccacagcgatgggcttggtgtcaggtagggctgccattcatcttctgcccactgtatgaatgtaattcaagtctttactctatttcatggtccaggatacctccgacccaagtttccatctctttgtcataaagtagaataggggtgggagatcagagctgcaaatgaagcaagtcatgcaaatggtttcccactggagaaaaggcacattttttcccgagatagggcagtgaagaaggtacagagcatggatttcagatcagagacacctgggtttgaattctatttctaccacttactactgtatgacatcagacaagttactaaaatctattttccatctgttaaagacacatgaagatctctccctcatagggccaattcaatgaaatcatctccagaaagccctcagtacacagaaagcactcaacaagcagtgactattattcttgtaattcccctatttggggagtctgtagcatcatcttcatgtagtactgattaactagtcttagttattgctgccacacagttttaccaccttacagagatgactcattatcacacagttcagatactgtgggacctgcaagtccaccagaggtgttggtgttgacctaaactatttggtcaaaattatgcccatagccaagccaaggtttccaaagagatagaaggtacatgggcttagtggcgcacctaaaactttttagcccaagtttggagattcttgggtagcttgagagttagaaactaaaagtagaatacttttaatggatttgtgattgaggattttttttgtttttactttctggtcctgtcctgtcctttgttttcctttcattttttccccctcttatgagttgagttgctttctcttctagggagctatgtgttaggaagctgctaatgaactgcttttgagtctaattttcaataagatttaatacagtagggattaaactgcccccttgaaaagagagattaagtgtctgcaaatcccatgaattgattttctaattgttttggtaataatgtgtatgtgtttttcatttgctaatgttgctgaaaataataataattttaattaaattttaaatgtatttttagtattttaaggattctagagggactaagttttcttgcaaggaatatgttaagaccataacattcttccctcaccccataattattatgatcagggaatatctataatatattccatggcaattaaattgcataccccagactgttcaagatgtgtttataaaaggagaaatggatttcccacagctgctcgcctgtgaatgcatccttcacacagaaccacagtagccagtatatgcactaaaataacagacttgaatttaaactttcagtgctttcaaacgtctttcaaaaacttctcataacacaaattgcttaatttgtgtacatgaaaactcactgattacatatgaatgagagtcaacctataataatggtgactttgagaatctttgtgtatgtgcccacccatctcttcaggaattagcaggtattcagtcttgttccaacattctgcacaagccacagtcattagtgagagcaccctgtgaaggctgaaatctgctgtgaacagtatggggcagctcaggtattttttataatattcatcagatggtcttcacccagtcacgtagctggaaaatgttttctgtgagatgagtgtttacaaaaaaaaaagattcatagagaaggagcaagggaaggaggaagagggaaaataatccaaaccagggtcaaggcagtcatatagactagaatcacagaccaggtgttccgtctttaaaaagcgatcgtcacaactttgatttattaaattggaatttaaatcttccaagctgtaatgaattgatcatgatactgttgatatagattggctcatctttgtggctgtataacaactataataaagaattaattgagtacctattaatcctcacaagcatcttggaagttggatatcattagccctgtttgctgattgaggaaactaaagttgaatggctttacatcattctttcaaagtcacccaggttttaagcagaagaatttgaatttgaacccagccctacctgcctctaaaccccatattctctcagctgtatctccctcctaggtgcaatggctccttggctgacatgctgaaggatatgtcttcacattcttaaactccaaacctcccttggaaataatttcctaacagtgaaactgccctaataatgccgtagtttgtttccaggggagaatatttgccttcagagcaggctccttctgccagctttccatttcataaatgcattttatgactccctcttcagagctcatatacctgtcagaagatcctatgcaatttatccctggggatagttaacattccccctgacccacccaccctgcaatgtcaggtgctctcagaaatggaagtgcaggatctccctcagtgcccatcttttagatcagtagctgtcactgataaaatgtctccttggaactacagagacaaagttgcaagccagccagcgggcccaccctggtatctcctgcagttatcagcattctcactagtgattgatagaacacgttttggagttgttttagttttgtagaatgttcatgggaacttagatgatatctgaggaaatgccttcttcaagtcactagttctaaaggaaggcagccaaattccttcagtctgagaattttggagctctgaagagggcatggacaaatatttcttgcctctcttttttaaatatggaatttggaggctttgtctgtcgaccaccatgccgtgtctttaagaagctctgactgggaaggaaacagccccaagtgttccaagctctgtctgctggaattaaatgtcccttcctgtttcctgacatccacaattctaattcatcctccattcaccctcagtgacttctgttctttgaaggttttgactctgtccttgtacatgaatttgacattcacctgatactctgtggggtccagagagcatgtactccccaccagcttcaactaactctaaaatgtcacagtttctgttaaagtgctttctagctactaccagagtaaacatacagatttgtctcccctgggtgtgctgtgagttcatggcataaagtattttctggttttaaaatggacttctggcctgtaatcccagcactttgggaggccgaggcgggcggatcatgaggtcaggaaatcgagaccatcgtggttaacacggtgaaactccttctctactaaaaatacaaaaaattagctgggcgtggtggcaggcgcctgtagtcccgggaggcggagcttgcagtgagccaagttcacgccactgcactccagcctgggcgaagagcaagactccgtctcaaaaaaaaaaaaggacttctggcttttctactgggaaatgtggttatctgtgccttctggaggtcaagatgtcatcatctggccctggtccctctcacttctcctcagactggacctcttctccagctgtttactcaccttcgtagttgttcacacaatttctccttcatgttttttggagcatctccctaaggtgcatctctagtcaccccaccttctcattcatcctcccaaccaccatggctccacatttatgaactacattcagtctattttcagcctgacatttaggaccttccacaggtagttgccaactttatctgccaataattagcccaagttaccccccagtgtcaaccaaactggaacgctcacatgttctgttcatctggaatacctgtgcctatatctgtctgttgacatcctaagtactccaccccagagcaaggggtttatgggagtagataggggaaaactctggtacaaagttgtaagaacgtgggttgggcttggagaaaatctagatggcatcctggggcaatggagggctcaagaacaatggcaatgtccagtccacaagacaggaggtaggggatttgaagagggaaatcctagcaatgtggttaccagaaacacatagaaacatacctccccttccctaaaatagttattggatataataataattgccttttaataatacatgacttagcaagaggcaaaataagggaattcctcagaggtgagaaataatagaaataatgaaaatctatagaagtaagaaaaccctggggcctggcatttgtctgctaatccctgtttgcctagagcatgggttttaatgagcagtgggtgcatctaggacaagtacaaaacttggggccactagtgtactttataagatattgattaactttagacttattaagatgaatatgtaacctataatttccaaggtctccactgacagaattgaaataaagcatgtagcttccaaactatagagttggagggaaaaggaatgagagaagggaaaaaaatcaacccaaaagaaggcaagaaagaaagaaaaaaaagaaacctagaaaacataataaacagatagaagcaaaaaaattcaactctaaactattcataagagaaactcctaaaagtatgagatagagaaaggctgccagtaaaacgatgggaaaggacataccagggtaatactctgcaaaaagaactaggtgtgcctatcttaattattaggaaaaactggacttccagaacaaaaagcaacattacagatgagttttcaatttaccagggatacataattttaaatttgtatacccctaacagcataactttgaaatatattttaaaaaattactggaactacggaatattcaaaatcacaaagggacattttcacacatctcacagagggacattttcacacatctctctcaaaattgatgggtcaaatagacaataaatcagtaaggagttaaaaggtttgaagaacacaattaagaagcttgatctaatggacttacacagagcactgaaagcacattctcttcaaatacacatggaatatttacaaaaatgcatcacatactaggccatagagcaaacatcaacaaaattcaaagaatctatatcatacagccaacattctctaacagttaaattagaaatcaataatgaaaaaaataactcagaaaacttcatacttttgaaaattaaaaaaatgcattctaactcatgagtcaaggaaaaagtaaaactagaaattaataaatatttagaactgaattgtcatgaaactactaatgggaactggtgagatacagctaaagcagtattgagggaagattatagccttactgcttatgctagagacaaagtacgtctgcagagtaataaactgagtgtttaactccaaaaattagaaaaagaaaagcaaataaatccaaagaaaggaggagtaaaataatataagcataatataaacttaggagcagaaatcaatggaagaacaactactaaataatagaaagtatccaaaaaatgaaagtcatcattttttctttttcttcaaattattaataaaactgacaaactgcaagcaagatttaaaaaaaaaacagagaagacactgataatcaacatcaagaatgaaaaagagggcatcactatagatgctgcagacatcaactaaaattaaaaacaggatattactgacaacttcatgccaattattttgagcatttagacaaaactcacaaattcctagacaaatgtaatttccatagttaattcaagaataagtacaaaacctgaataagccaataaccatgaaagaaattgaatcattagttaaaattgttatcataaagaaaacatcagactttgatggctttgttaaaagttctacaaaataaccaggaaataaataattctaatcttacacaaactatcccagaatgtataaaaaaaagaaggaaaaccatgttatgcatcagatacatccttgatactaaaactggagagccacaaacagaaaatgtaggtttttcaaaatgaaaatttacaatagcaacaaaatatataagccatcaaagaaagaaaatgaacaaaagggatgtaaaactgttataaaactttaaagacattaagaagacaaatagaaacatatataaacacaccattttcatggataagaacacaatattctaataaaaagatgttcggttccccccaatttaaaatagatattaccacaattctgatcaaaatccaaaaatacttttggagtatatttaaatgattctaaaatttatctgaaagagcaaatggttctgaataatcaaaacactcctgaagaagaaggaagagaaagtgagggaatttgccctaacagatatcaaggattctaaagtaatagcaattaagatagtgtggcattgttgcagagatagacaaatagatcactgaaacaattagaaagccccaaaataaacatataaggaaacttaatatggcacaatccgtaccgcagatcagtggagaaagaggatgtactactaatgaataaatgtttctaggcaatggaaaactgaaaatagaatcctacctcacacccaacacaaaaatcatttcctattctggatgggtagagaacttaaaaatgaaaataaaatatttttaaaatttagaatagaatttcagagaatatctttgtaatattagggtaaggaaggacttcttaagacataaacagtatggatcttacaggaaaatattcataaatccaactacattgaaagtaaaaacacttattcatcaaaacacacactaaacagggtaaagagatgagccacaaactgggaaatgatatatacaaacttactaacagaagtgtctaaattatgccaagaactcttacaagtcaataagaaaaagacaaatccattgaaaaatgggcaaaatgcatgaacaagaacttcacaaaagagaaaacacacataaatgacaaaaaaatccacatgtaaaaacatacttaatctcacaattagtttcttttaaaactgaaaatgaaatgttagcatttcacactcaccaaatttacaaaaattagtttgacaatatcaagtgctgtagactatgtgaagcaagagaatgactcatatactaacagtgtaagtgtaaattgaaaaggaaaacattttggaattgcacggtaaaattgaacacacacatactctatagcccagcaaaccactcctacattcaaagccttgatagtgttggtagcagcacgtaatagaaaactggaaaccacctaaatgaccattgttggtaaaatggataaataaatacaaagaggtaatatactgcaataaaacatgaaaatactagagctatacacaacagcatagataaatcttatatatgtttgaatggaaaaagcaagctaaagaaatatatctggaggatatggttcaaaagtaggcaatattaaactgtatatctgtacacgtataattgttatatatagtcatatacatatatgtggtaaagtatgaagtggtaaaactgtagaaaagcaaggagtaattaagaggcaagacaggctagtgggtacctctggagggaggaaaagatctgcagtgggcaggggtgtcataaatgggtttccaagatactggtgatatcattcttgcattaaattatggacatatatgtacttattattttcaccctttataatatacatttatgttctgtacaatcttatgtgtgtatggtatatttcacaataaaacagtcaaccaaccaatcaatcaagctagctagaggctaaagaactgaaactagaatccataagatgggtctagtaggttttcaaggataaataagagacaatgaagtttccctgaggctatgatccatgactgaaactagcaaaaagcttcacacttgaatgagaagaaagctttgaagcagggcagagactcctgctggtgcccttggaggttgctggggatgttataactctaggaagtaaatggatgatttgagaaggaaaacttgaacaaaggggtattggctttcttttgtaaccaggaaggtacataatttgcaaacgtgcagatacaaagaagatactgtctttttataaatatgaggcatttgtctcagttacttatacaaataaaagtttattttcccttatatcacaggaaatccagaagaaggcagtgcagagcttgttgagagagttagcaatattttccaaatgtaggctacttccactctgccatttttagtttaggggctttttgccccatgcagctccaaagttctcatctgccttgaatgcagcattagggatattttcccaactctttgtcaacgaagttaaaggcttttctagaactcatccacagccggctactcacatcatagtcatctgaatggtgacacatggacatttcttgcagcaagagagcctggaaaagtaattattttgctattgcagactgtataataggagcaggcaaaagtgaagggggagaggtgtgtattcagcagtgtctgtcaaaatactccactaagaattcttcctcttttatccccaggagccagtctacttgatgacttatacaagtatttcttcttccatcactcccacggagacaccatgactgtcatggatccaaagcagatgaatgttgctgctgctgtttgggctgttgtttcttatgttgttgcagacatggaagaaatgctgcctaggtcctagaaacagtaagaaagaaacgttttcatgcttctggccaggaatcctgggtctgcaactttggaaaactcctcttcacataacaatttcatccaattcatcttcaaagcacaactctatttcatgctttctgttattatctttcttgatactttccaaattctctgattctagaaaaaggaatcattctcccctccctcccaccacatagaatcaacatatggtagggattacagtgggggcatttctttatatcacctcttaaaaacattgtttccactttaaaagtaaacacttaataaatttttggaagatctctgatttttatgtgttcatttatgaacattaaatacgaaaatattatggtttatattatttattgaaggagtagaggaattactcaactttagtatgctcttaattgaatatatggaggcatttgactttctaatttgtatatttttatattatgtgaattttaaaaatgagctttggaattttttaatttatagaaaaaaaggatatcatttggggaaaaaatcaagaatgtataattcaattgccttattaaaggtaaatactagggtctgtcactagataaataataatgctattttgcatttatgttttgttattttacacaacatttccatgaagttggggcttattcacaatttgctgatgacatggttggagctcagagaggctcaataatatttacagagtcgtctagagcaaaaacattaatccccatcctctctggagccaatttctactattctgcctcacacaacatccaatattcaataaaaaattacaagacacaccgaaaaaagaagaagaaataaacttattgtcaagagataaagcaattaagagaacaagactaagagatgacccagaagtttgaacgatcagaggagtttaacctaactatgatgattatgttaaaggtctagtaagaaaaatggactacacacatgaacagaaggggaatttcagcagagctggaaaccataaaatggagtcaaatacaaatgttaaaaaatgcaatgtcagagatataaaatttttttgtcagactcatcagccaattggacaaggctgcagagagcattagtggacttgtatgtaggccaatggaaattatccaaaaagagaagaaagagtaaaaaaaaaaaaaatgccagagtgaatcatccaagaattgtgatacaatatcaagttgtctaatatgtgtgtaactggattttcagaaggagaggacaaagcatcaattgtattaatgataaaaaaatgattgaaagagtgggatctttcatttctgacgaagtagcacaccagtactctgacccttacactgaagatgactaaaaatgctagataatatttgagaaacatcttattaaatatatgaatgaactgattaacaagaatattagacaaaagactaagtatcgaaagactatataccaagagatacatagaatattttttgcttttaaaaggtttttaaacttttaaatatatatatatacatatgtgtgtgtgtgcgtgtgtgtgtgtgtactctgttgcccaggctggagtgcagtggtgcgatcttggttcactgcaacctccacctcccaggctcaggtgatcctcccacttcagcctcctgagtagctgggaccaaagggtgctaaatttttttgtgttttttgtttgtttgtttgtttgtagagatggggtttcgccacattgcccaggctggtcttgaactcctggactcaagcgatcagcctgcctcagcctcccaaagtgctgggatt

SEQ ID NO: 127 - DNA, 42271 bp, Homo sapiens
  source 1..42271: mol_type = genomic DNA
ggggttgggggaggcccctgctctcaagcccccactatcacaatcactttgtcccagctattcacctgcaaacttgcttgatctgcagaagctgcagagtggcccactcttcctggacatgtcaggaaaactttgacgtggctgctctagcttcagggaaggtctaatttggtgaaaatttgaaagcaggtttgtgggagtgccagggagaaatggggagagagaaagcctctgtatttgatggatggcaatggcttggagctggtgtgatggcctctctggatgacaaggacattggacttagagccagaaggactgaggtatgaatctcggcattcctggtttgtagttatggggacttggcagagacacttgaatgaaacttcctttgcccaggtataagacggaccccctaataaaggttgactgtgttctgatccttcactgcctgctgggatgtcctcagcattttgtgcatgttggccaatttaaccctaacagcaaccaccagaggcagatgctattgctggctattaatatccccatgtgacagatgagaatgtgaggcccaaggggtttaagtggggctatgaatatccccatgtgacagatgagaatgtgaggcccaaggcacagaaccaggggtgccccagcatgccagttgtgcacctgtggcttttcccttggccactttgcagcaccggcacgagagaggcccacagggtgagcctccacaccaccagccaccctttgtccctcagaaagggctggcagagcctgcaggtgagggtgggtgtggggaggggtgggcaatcgtctgcccttcatttctgtcatgttgtggctgtcactggggagaaaatgccaaaaagcttcctggaagaagcagcttccaggaggcttcaccatatccttgtcctgccaagtggccacgaatggattagaagattcccactgggtgagaaggctcagaagccaccacagaggatggcggaggtgggagaggcctcgcaccgcggggctccaggagccaggtgaaggacaggcatttctgtatggcacccagttctgggtgggtcctcccaaggtgcccccttctttgtctctccctctgttgcttttctctcctcttccctcttcttccccccacttcctcttcactttttcttcactttttcttcttcttctctttccttcccccatgcctttctcaaccttgtttccacttcttgtcgctcttcttgcttcaacaaacgtcgatgcagtcacagttcctgggctgaggctgggggatgggaggaagtcctgagggcagcccccgcccccttccccgccccgtcactccctctgccccgcctgcacagcttcttgccaattcattcccgcccctaccgcccctataagccaccaggtcgctccagtttggtgccagcgcctggagggagaggcgtggcgagggctgtgctgcctaggatccactgagtggctcttgctggcgtgtcagctgcgcgcgaaccagggctgggaggctcggctggaggtgtgaccagggcagggactgacctggcccggaacagaagcgcgcagagtcccatcctgccacgccacgaggagagaagaaggaaagatacagtgttaggaaagagacctccctcgcccctacgccccgcgcccctgcgcctcgcttcagcctcaggacagtcctgccgggacggtgagcgcattcagcaccctggacagcaccgcggttgcgctgcctccagggcggccccgggctgctcctgctccgcagagctacgccctccccccgggtgccccggaccctgcacttgccgccgctttcctcgcgctgctctggaccttgctagccggctctgcacctcccagaagccgtgggcgcgccgctcagctgctccatcgcctcactttcccaggctcgcgcccgaagcagagccatgagaaccccagggtgcctggcgagccgctagcgccatgggccccggcgaggcgctgctggcgggtctcctggtgatggtactggccgtggcgctgctatccaacgcactggtgctgctttgttgcgcctacagcgctgagctccgcactcgagcctcaggcgtcctcctggtgaatctgtctctgggccacctgctgctggcggcgctggacatgcccttcacgctgctcggtgtgatgcgcgggcggacaccgtcggcgcccggcgcatgccaagtcattggcttcctggacaccttcctggcgtccaacgcggcgctgagcgtggcggcgctgagcgcagaccagtggctggcagtgggcttcccactgcgctacgccggacgcctgcgaccgcgctatgccggcctgctgctgggctgtgcctggggacagtcgctggccttctcaggcgctgcacttggctgctcgtggcttggctacagcagcgccttcgcgtcctgttcgctgcgcctgccgcccgagcctgagcgtccgcgcttcgcagccttcaccgccacgctccatgccgtgggcttcgtgctgccgctggcggtgctctgcctcacctcgctccaggtgcaccgggtggcacgcagacactgccagcgcatggacaccgtcaccatgaaggcgctcgcgctgctcgccgacctgcaccccaggtattggcccagtgcatgccgacaggcccaggccagggacttgggcgctccctgggcagttggcttgaggagcctgtgggcatcaccaccgttactccgcccagagttcaccagccacagcactgcccctgcacgctgctcacaggggtttcctgttggttcattggtgcagacactgcgggggcctctgcctcctgggatatgtgctcagtgcacagggagctttgcgcagagctgtggggtgtgcttctccgggaggggttccgcgggctctgctgtgggcggccagacacacccctcctgtgcatggctgtgggtctgaggcatctgcttgtttctgcccactgctgacccagtgcccttgcatggacttgggcttcaagtcttgagcagggtccatcccccatgctttctgctcactacttggcaggatttgtctcctgaatctctagctggtgtcgccattgttccaaattacctcctgtaggtgttcccctttcccccttggccccccacagaacacccaagaggctctcctgctcctggggtgggcaggccacgtgacttctccctccttgagggccccagccttgcccctccatcagcagcctgcctcagttgcctctgtgtggagaaggatgagccagagggaagggaggaggagctggcccttctttccagacttcctttatttcacctacaaaaaagcaagcctaccccttgttctttctctctcccccatccctctgtcctcctcaggttccaggctaaacatcctcctgaaaccctcctgtctgccctcacttcagcccctgggctctgggcctgggttctgtccccaccctgccatcatcctgaccactgtcctctgtccccacagtgtgcggcagcgctgcctcatccagcagaagcggcgccgccaccgcgccaccaggaagattggcattgctattgcgaccttcctcatctgctttgccccgtatgtcatgaccaggtgggtcctggcagtccggctcctgttgtgggaacagctgggtgggcttggcctcagttgagtaggcctctgaggtttcccagcaagatatctggagggcggccaccaccagaggaccctcctccacacctgacgggctcagggctgtgcttcagctcctgggaaagatcctgggagggaggtggcactggctcccatcctgtcctataaatgaggagactctccttgtccaggcacaggcagatatggggtctgtgaatcagcacctggctctttaaacctagaaagctttcaaaatcaggcaacctgggactaactcaggcctcagactccgcatctcctgggcgtggagttgggaatctgggtggaagctccagctggagcctcggggcagtaacactgccaggtgagtgttctctttgcttctctctttcctggagaccttggcctgagtgcttgtcaggtcagaattacctggagtcacaggtaatttgggaaagagtgtgtgtaaagggcctgctggtaccatcatcacagtgctgtgctgaggggcaggggagtctgtagtttttgcctccggggttcctgggtcacccactcggccacttggttactaccttagctccactcaaggaaatgtgtgcaccctgccttgctggaaggcaccgtggttagagggaggcaggttgtttattagagatggtgactgcttgctattacgttttgcctttcttggaatctccatggaatttctggccaggcccctgaagcgctcaggctgtctgggaggtctccaccctatgtgttgagccatagcaggaggataccctgaaggaagacgctcctgggaggggtccatggccctcatcctcaaggggcccaggtccccaccccaggggagggagccagcagggagtatagtaccaggatcctggctctgtttgtgtagggtcctcctgaggttgctatctaatgccctacaaggtctgccagcctgtccaggatgactgcttgtcttcccaggttactgggtggcttagatatgttgttgggtgggtgggggggaaacagttgtgtcccaggaacccgggaggccccagagtgcccacgctgagtggcaccagctctctcctgcctgccaggttccctctgagctcttcagaatcagcacgtgggacaggagctcttggcaccactgatcccatctggcttagggacagggagccaggtttcttgtggatcacaggcatcctccttcctcacataaaacctggcaaaggcctctggttcttaggaaacttcatgggcacaagtgtggatggggaaactgtagcatccttctcccgggaaccagctatttatctgattatcatgtttgtgtgtatgtgtgcccatgtgcctgcgcatgcatgcatgtgtatgttgtgagggttcatgtgtatacacacatgcatgtgtgtattcatacatgcacatgcatgtacatatgtgtagaaggtgagtgctaaaatttcaagagctccagcatttagttttgaaattttaaatgaatgatgagtgagactggcttactcagccatattatgttgattcatgggtgtaactgttattttcctgtgtgtttacaatgccctgaacatgtatgtgagcatgcatagctatgagtgtgcacacgagtgtaagaggaagaatcccaaacaaagtcatgaagcctgcctttgcagtgttgtttccacaatgtcgttaccaactctgggatctgggcagctcaggctctcttctctgtgaaaaatgtgggtacaatatagcactaacgaggttatatatttcttcatgcactcactaagcatttaatgagcacctactctgagctggctttgtgcctggtcatgcagttacaaaagcaaatggaacacaggctcctctcggttctgatggtgggagatgcaggtcagcaagaccaggcaggtgtttcagtgggggaggggtcttgagggctggcgcctgggagcagcacagctggaccagtttggacggacctgcctcacaggcgcctctcacatcataggagtgaaccgaatcagaacctcactcctgagtgtgtgtggatgaggttctaatgcagttggtggcttaacccacaggaagtcagagatccaggagtgtgttgtccctgctgccccttaaaaggtagtgcactcattccaattgtcctgcaattgctgaaaatatttcagagctcttctcctgggaattgttttcagaactgggctgcattgttagactcttctgtggacatctagaaggtgaatttaatctggttagaaataactccaagtcaccttgagccagttcatgcggataaagcaggtaaaggagatgggggacatgggatttttattttgtttcttggttgtcactcttgagttttactgactcaatcagtcgtgcagatgaagcccgtggggtgtgcggcagtgagaccaggagggcagggatacagagccctcccttgtggagtctgtggtctactggagacgggggagggcagatggctacggtcacaaggtgttgagcagcagtggacacgtgagcgagccctcttctctgcagggtcatggctggtagttgatacatgagttctggtcccattgtggctccagacacagcctcagctgggtgtttctgatgacttccacctgcaccgtggcttaactaggggatagacactctggcatgtgtgtggctttcttactcacctgcagcccagtcccctagtggctgaaagaaatgccagcctcctcagatccttcgataggaccttccttcccacttgcctgatggttggctgtgaccagtctccagtctatgcctgatattgggctccctgtatgtgggggtgacagtgtacctgatgtgcatgtgctggccggtggcaaagccctttccggactatcacttactgtaactggatcctcaccacagcctggggtaggtggttagagccatgactgccttggatctgtgtccctgccctgatttttggattctggatgcctctgctctggctgtgcccctcaccttctctctgtcgtcacattctggccctgcccctcagcttgaggtggttgcctgcctgcctgcctgccagcctcctcatccccatcccgccggactgggtgcctcggagggagggagtcagtctgatccattgctgcaccccagcagctgctgtgtttgtgggtggtccaaactaatgagtgacccagccaaacttgtaaatcacagggctgcagtccttctgagtgggggtgggacatcctgggacagaaattcactgcctgggagatcatcaggctgtgggggaaagccctggcctttgggggccctggttcaaagccaggaactgggaggtggaacagctgccactggtcagcaagtgtgcttgtgacagctgtcagaagcctcgtcctcactctgtggcccccacctaaggctgtgctgccgctggtcagaagccttgtcctgactccatggcccctaccctaggctgtgctgagagcggaggggtccgtcagagtccccagaggcccatccccctgctgctttcccccacgcagagcccagtcccttctactctgagttctaatctgatttcagaaaagcactgggctcagacacagagtgtgagactgagcctttcttatgggagttgtgtgcctggtggtcctagagacaccctcgagcttctctgagtgatgcttcgggacagtgggtagggaagcaccctgcgtggtgtgtggtgcccgtggacatcctgtgagtgactgctgttcatgtgggtgaggtggtcacacttgctcagggtctgttctgcagcccaggttgacacctgttactccaacctggttatgagcattgttctgatctgttctcaacattgtccaggtttgggagataaatgccagaggagagtctggttgggggctcccagagctcacatctggggtgtgttggtctgcagcctggtagtggtaatggctccctcggtagctggttgtgtgtgcaggtgtccgcggcaggtgtacgtgcaggtgggtggactgagctgagtgtgaggatggtgggagaaggccttggtgacggtggcagtgctgccacctactgagcacctgctgtgtggtatgcgggctgatgtcggcttgcaccgcagtcccaggactgggccttgtaatcccattttaggaagaggagcccaaggctcagggtgctggtgcagagccccctggctagtgagcatcagggctgcggtacgtacttgagtatggttctagcaccttcccccggagcgtgagtgcgtggcaggtgctgtcactgtggctgagttagctgctccgcttccccaacaggctggcggagctcgtgcccttcgtcaccgtgaacgcccagtggggcatcctcagcaagtgcctgacctacagcaaggcggtggccgacccgttcacgtactctctgctccgccggccgttccgccaagtcctggccggcatggtgcaccggctgctgaagagaaccccgcgcccagcatccacccatgacagctctctggatgtggccggcatggtgcaccagctgctgaagagaaccccgcgcccagcgtccacccacaacggctctgtggacacagagaatgattcctgcctgcagcagacacactgagggcctggcagggctcatcgcccccaccttctaagaagccctgtggaaagggcactggccctgccacagagatgccactggggacccccagacaccagtggcttgactttgagctaaggctgaagtacaggaggaggaggaggagagggccggatgtgggtgtggacagcagtagtggcggaggagagctcggggctgggctgcctggctgctgggtggccccgggacagtggcttttcctctctgaaccttagcttcctcacccttgttctggggtcatggcgatgcttcgagacagtgggtagggaagtgccctgtgtggcatatggtactcgtgggcgtgctataagtgactgctgttcatgtgggtgaggtggtcactcttgctcagggtctgttgtgcagcccagatggacacctgtttctccaacctggttattagcattgttccgatttgttctcggcattgcccaggtttgggagataaatgccggggcggagtctggttgggggctcccagagttcacatctgatagtctgtggtcaggacctggcaggcacgggcagtccctgggacatgcccatctctggaagcctaggggtccccagctccaggcctgtccgctgtgactgcctgtgtgggcacgcagatggagcctgtctcctgccttcctttccatggtttgccaggggtttggcatcttgactgcggaagctgtggagtctgtgtgctcagagccttttctggtgaagatatcatcagagcatgtgacctctgtttcctccccctgaaggccaccgctgggcctctggatcttagacatgagacggtcaagagattgaagtagtagccagggcccaggtgtccagagagggtggcctgggatggggagggcccttgctccccaacagcagtgctgggggagccaagagaaggtggagcatccctgagtagtggtgtgcatcacccccagtttagtaatcacggggtgccattccccggtgggagcacccaccatcaatgtcattgaatgtccccatgggacagtgttgaggacttttgtgacatctgtcctatttcacagctcagggaaaggtgcacagtgcacacgggcacccggtggagaggtgtgtgtgtgaatgagtgagcgagtgaatgaatggacacgattctctcttcagcctctgtcattgctgttttcttcaaggcccagggccatcccctgcagaggtagggtgggctgcaagacctcaggcccctgcctcatgggactctctgatgggcttcaaccgtgggctcttgcaggcatggagcctgtatcatgacaccttacacccaaggccagcaatgcaaggagagtatggacatcaaattctttccttccagaggctgaattcttcaaagacacacgcggtcgtcacttgctcttggcattaacggtggagaacccagctgaggtggcttcacagattcttccccaaaaacacaggtgttattattatacttttaaaaaactttttgagacagggtctgactctgttgcctaggctagagtgcagtggtgcaatctcagctcactgcagcctccacctcccatgctcaagccatcctcccacctcagcctcctgagtagttgaggacacaggcacgggacaccatgcctggctaatttttgtatttttttttgtagagatggcggtctcactttgttgcccaggctggtcttgaattcctgagcttaagtgatcctcccacctcagcctcccaaagtgctgggattacaggtgtgagccaccacacccagccaaaaccaggtgttatttgctgactcaccaatgcctcccccaaaaggataaatttaaaggtgtgtataacccatgaagtgtaattcaaataaaacaaattatcgtttggaataataacaactataggtatgtggtcaggaagcagttaaaaacattaaaatacagacctggccagttcaatccaacccaggggttccaagcaggaggtggggcaggtgggcgtcatgccctgattcacagagggcacaggtgggtgtcatgccctggttcacagagggcacgtgaactcgagaccgtgctgcaccccggtgcccctgtgcttataagggagggcacgtgcacagcagaagcaggttgttccccatttaaagttctggagcccaggctgtgagctccttggctgagccctctcctgtccctgggagctccccaggtgcgaggagcctgccagccagtggggcctacactctgtgttattgcatctccgccaggctaaaagccttggtcactactttagagccactcaaggaaacgcgtgcaccctgccctgctggaaggcaccatggttagagggaggcacactgtttcttagagacggggactgcttgctgtcatgtttcgccttcctcggcagctccatggaatgttctggagcaggcatcttagggcattccctccgcacttctctgccagcccatgtggctcccacactgggctatcccttgccttaggcttgtggccttttttttttttttttttttaatttgaaaaatatttttcatgtgcacttaaacgtgttgtggaatgatgctgggtctcaagaatgctgtgaatcaataaacattttattcagagggtgtctcatttccatggaaaggggggaattctgccgtgcattagccacagtccaattaccaggatagcagagctttctagatgcctgggcttgcaggcaatcccctgctgggcttccaagacctccaggctaggccctgcactgtgtgcagcgagcgagggagccttctcctgttgttttgacggtggagctgcaagcttgggaggctttcccgtgggtgggcgggaagcagagagccgtgggggctgtgaggctggcagggagcttgcaggacataactgctcatttattttatttgggggaccggagtttttttattgattccatctgtcagagggctgcagcattccatgacgggtaaggcagagggaggccctgtgggagcccagagtgacagtcctctctctcagcttgccttcttgtccttttgagaccatgatctgcttctcctgagcctccctcctgttcacatgggatacaaaactcagccagaaggggttctgagccaggagccctctctccatcccctctgtgcttgctgaccctcgccctcctgcctcacctgggcacccatccgtagccaagcctccagaacccttcctggtccctgtcgaagcagtccttcctctcacccaccctccaccaagcagagccagctcctagaaatgcagctgagagcaggttgtgttcctgccagaagccctgagaagtccccaggctatggtctctgctcctgagcctggcattgctggccctttctgttctctgtcctcactgctccccactcctatctacgtggcctcgggctaaagtactgggtgccctagtctactggcctctccccagggggcctggatcctttctgggccttctcttggtacttcctcctcctctgcttagccaagtccttccacctgactgaggcagacacaaccctccctcctcaggtgctcatagccccagcacccttctctcaagggtccagccatagggtgggtaggaacagggtcagacccacttttatccccagcacccgctctgcagcaagtgctggggatgccggcatgcacacaccatgtccagctggggagcaggcttccaacgactgacaggctcctccggctgccatgctgaccctaccccaacctcatgagccccaaggtgggccgctcttttgagcggtgagtctgtgctcttttgatgacacaaagtggcttctctcctagaaacttgtcctgcagggcaccccccatgggaccacacacccggccccaggggctgtgctcttgcagacttggctctggccacacctgctggttcactggccccaccttgactgcacaggtgtggctgggtcctctccccgtggcctattgcccgctgggctggctggacagtgtctggggatttggtgtgatggggacgacttggatgcctcttttacccctgggaacgattaaccctgtcttgtgatttgcccctgatgaaccatttggtgggttgggccctcgtgggtgagacgctgtggattagaggctgtcccttccaacttaactgtggaagagagaagctggttccaggaaagatgaccaaattcttctccccgagtcttaaaaagtgacacaagctagcactcaatttcctcaaatctaaaatgccgttgattttaaactgtctgttttaggtaccactgggaaggaaaagcccagaatgagggctgtgctaggagacaccctcaacaggtgggccactcacggctgaacgctcagcgtccacgagaactaagcctgccacagcaggggacaacaaggaggcacggtgtccccaccccagctctcagggaggaggaggaaaaccctccctgggactgtgcactgccagctggggctcgggaaagcatggagtctgaattcgccctcagacctgggctggaaagctcagacagggaagtcaaagactgtggccccggaggctggccggggcagtcagagttgcttctggaaggacccagctgagtccaggcagagagagggcaaggttgagcaccaggcgccccagatcccggggggtattgaaatgggcatctttgagcagatgacctgcaggaagcagcacctgctgggtgccagcaatgagttggggccacagtgagtactgtctccattaccccagcctctgggcgaaggggcttgtcctaagtctcagggctggctgagtggcagctggctctggggactgctactggtgcactggtatagctggcaaaggaacccatgaggcacatggctcctaaaggtccagccacccagcaaagccccctccccgcatccacacaggggacaagggtcaaaaggtggggacatgccttcactttcctcacctgacaggccctggtctgctgggatcagcgctgcagccagaacccgcattcacccgcgacgcagcctgtgcaggggaccaggggttttaggcaggatcagcagggaatctgcataccagctccacagtgcactcaggtggcagatggggaaactgaggcccaaggaggggcggggagccccttggacggggcggggcactccgcccggggcaggcaggggcctttatctgctgtcctgcccctcctcctcccccagcggcatcctctctctagcttctggcgctgcccactgtaacccgactccggcatttgcgtttggggcgccctccctgcgccgggggcgggagcccagcgagcgcagagccccggccccgcgcggcccgagtgccacatcactgcgctggccgtccaaggtccgccgccccaccatgccgcccccgctgccgctgctgctccttacagtcctggtcgtcgccgctgcccggccggggtgcgagtttgagcggaaccccgccggtaaggccgtcccctgcccccaccctccaccctccaccctgcaacctctggggagtgtgatccgtcgcttcccaggggcccgggagctttcttccagtaggtcacgcgcctatggtcctggcgagaacgtctccaaagtgggcagcatgtggcctgggactggtagtgtgacctctcccctggacggggacaccagggaggctctctacggcatccaggccgggaccccaggcagcagagggtcaccacgcctgggccggggggtgagatctttttcctgtcggacacagcagcaggggcgccctgcaggtgggttcgagggagcaggtgccaggactttgcagggtgagaggccatctaaggtccccgggtctttccaggaacgggacagtctctctgggctgtggcaaactcttgacccctccctcccagctggggctgtgatgtggacagcaagtctccggaagtggccctaagggctgggagggggcgtgggccccctggagggatctggggcccggagagggaatggacgcagggatcctctgggaggtctgcccgcacgacctcacccaaggggtgtgcagcgggggtggggagcaggaaggtagaggctgggggctggatcctgggctcccgtctggcctcacggcctctccaggtgtgggggtgcatctagccaaccgtgctcaggactctcatcagaagcagacatctgggctcctgcgggagtggggccgtgtgtgggttcaagggtgcagggtgtcaggttctgaatcgcttgttctctggggtttgtggatacctgagaactgcctgagccctgcgagtggatgtgccaggaccacaataccccaccccagtgcgctgtgtcgacacttttcctttccgtcctgttgatgcctggattttcctcccacctctgctcctcgccttacctctgggctcttttctacccgctgcgtgtgtgctcatgcaggtgtgcaggtggggtgctgctggagcttgtgccgtgttgtgggtgggcctccccttggcccctgagagcccagacagtatctagaatcataggcttgttggagaccacagccccctcctccaggaagctctcctgacctgccctttcccaggaagaaatgcagcctcctcctctgcacgcaggcagcacagaccaccctgtcctcacccagcaggatgcatgggctggtctctgtccctggcaggtgctgagcacagccgtggcatcggcaagtgtttctgggagaaatcactcatcccccagtccagtctcccctcttatggacgagtgtggaagtcaaggacgtttccagcccacaggcagaagtgggcagagccggtcacctgcagtgcaggtcccccaccccgggctgccatgtccctgtctcgccatctgggtcttgctgagagcaagcctggtgctctctcctctctgcctcacccttccctggtggaagattccctgtcctcactggagcctggggacggaggtaattttcatgtcctagggtctgggattcagattctgactcctcaactctgctgtgtgacctgggcagatggcctgacctctctgacctcattcaggtctcatccctgacccaggcacagccactggtcagttgaggagggggaggactgacgggctgtcactcccctgttgaagaaatgctgccacctcgtggttaagaggcttagaactatttcaaaagccgctttcagaccagtgctgtccaacagaaacacaaagccatccacgcacagaattttatattttctagtagccacactaatgaggtaacagaaacaggcgaaactgattttaataacaaattctttttttttttttttgagatggagtctcactctgtcgcccaggctggagtgcagttgcgcaatctcagctcactgcgagctccacctcccgggttcacgccattctcctggctcagcctcccgagtagctgggactacaggcatctgccaccgcgcccaactaattttttgtagttttagtagagacagggtttcaccgtgttggccaggatggtcttgatctcctgaccccgtgatccacccgccttggcctcccaaagtgctgggattacaggcgtgagccaccacgcctggcctgtaacagattctatttaacccaatatgtccaaaatattccagcattttggcattcatataaaaattattaatgaaacacactgtttttagtactaagtctgaaatttggtatgcatttcacacatcgcacacattggtttgatcttgccacatgtgaagggctcagtggccacgtgtggctcgtggctgctgtactggagaccatggcttgagagccttctaggggcataggctttcaccccactgtgcgtttgcaagtctgcagggggatccggggatgtctgtgtcccacggtggttggggtggggaagcaatggtgaatagcctaaccagccacagtcgtcctggctttgctctgtggctgccagggcaggtgcggcctgggagaggcagagggtgggctttgggtcagcaggcccacccccgtgtggtaaggggcaaaaccagaggcctacggaggccaaggcagctggcaaaggcccagccacatcatgggactagctgtgtggtcttggggcagttgcagcccccgagggctcctcccagaccatcctgactctcttgtggccacagcagcacccactggggcttgctgattgttgggggaagaattgtgttttccagaaaagacatactgatgatgtaatccctggcacctgtgaatgggagcgtacttggaaacaaggtctttgtggatgaaatctgattcagatgaggcctcacgggattagggcaggccctaagccaataactggtatccctagaagaagagggagatttgggcagagacagacacagggacaaagttcacacatgacaacagaggcagggactggagtgctctggccacgagccaaggagcacctggggccaccaggagccgggaggggcgggagagttcttcccttagagccttgacagggagtgcggccctgcagacctgcagacttccagccttccagcctccagggctctgaactgttgttgcttttttttttcaagatagagtctctctgtcacccaggctggagtgcagtggtgtgatcttggctcactgcaacctccacctcccaggttcaagtgattctcccacctcagcctcccgagtagctgggactacaggtgtgtgccaccatgcccggctaatttttgtatttttagtagagacggggtttcaccatgttggccaggctggtcttgaactcctgacctcgtgattcacccgcctaggcctcccaaagtgctgggattacaggtgtgggccactgcacccggctgttgttgatttaacctaagcatggtgggcgctttgctagggcagccctggcaaacaaacccacccctctctgtgccttgcacatggcggccagtggaagtgggggtgacccagccagcagacactcttcctgccccttgggaaaccccgatggggctgcatggcttattgtggggtcacaggggatagtcctgctcctgcccacgatatgccccaagactctgtgtgttgagcattcactgggcacctcaccctcctgttgtattaatcttgatggatcctccaacagccctatgaggtagacgtgatccttatcccaatctacacatgaggaaactgaggcacgggcagtggttcatcctggagtcttagtgccctcatctgtgaacaagggagactggaagccacaggaagccaggaaggatcgcctgtccagtccctgtgtgatggtccagtcacttgtgtgggcgcttggtggctttggaggagcaggtgcagggatggacacctcaccttgtagctccctgaggccagcagagttcccagggtcaagtcaaagttagttcttccagtcgctcatgtctgctgagtgaataaacaaagttccaggttcacccaagctcgccagctcagggccaggccacgctcagtgccagccgggcaccgtcagagccttgtgatgggtacccagggagtggagcaggggtgctgggctgagatcaccttgacccttgagctgactgtgctgtagcatctgcctcggtccaagctcagtgcaggatgagaccacgggtcagctgagtgcaaaccctgctgccagagtggccccactggtggccagctttgcacaccggtgctcgctcagggccctgcacaggatgggtgctcacacagggccctgtgtggatgccagccttttatctgctcttcccaacatcacccagttgtctttagccacactgacaggggggtgagggcacagtatttcaagcagaatcccggaccagcttttttttcattccttttttcctaaagttcaagctgtcatgcctcctttatgctgcagattggtggagtctggggacgctctgtctggaccatgaaggcctgggagtcacgtgagggtgccagggagggtgtctggacagtctcacgcccacaggcccgtgacagtcatccagggggactcaagctcctctgtgctcatcccagcgcgcgttgtgggcgtccgcgggcatggacgggcaggtgggcacactgcagcacccctcttgggttagggccgccccactcccaggtgctttaggaaaacagtgcccttgcctgctgctctcccacactcagcacagcagggctcctgcagcttgtctccgggttgttctgaaaccatcgcaggaatgatgcacactgtggctgatggagcctcttccccccggaagatcgtgtgctgggctcggaccataggtcgtctcatctcacagtattcctacaaaatgattataatgaacccatgtgaaatgggggaaatggagacacaaaagagccacttgcccggggcccccggctgtgatgtggcggttggcacctgggcccggtggtctggggctgggcatcttccctgccttccacagcccttgtggttcatagtccatgttccctgccagcttggacagggagggagagtgagcccaagggcagccgtgtcttccccagggccgcccgcacacgcctgttccacgcccggagagcgctgtgtggacctcttttgtcatctgtgatgaggatggaaacgggagctctcctaggagtgcctggtggaggactagtgccctaaacgtccccatcccacaagagctctgtgagctgaatggtgtagggatccaggactgtggttgcccagtccccagtggggaaacccagtcccaggaagttcccgagggtgggagctgcctggccacagagcagcccaggtctctctgacctttggagagttgccatatgctcagccaagttttcacagcccccagatcctagggtgagctccgaaaagcggcctgcactctcctggcctcaaggttctgtcccaggttttggctggaggtgaagtcacagccaggcaggcaggccttttcctctgctccagcctgcttgcccccttctccctggccccctgcacccactccacacgtcctgcctgtgggtcacgtccccttctccgggttcctgctgctcccactgcccagcctgccccctctctggccaggtgggctccggcatgggcccgtcccagcactagccgggttttaaatctgatgccgggttccccgccttggatgcgttctcgctgcctgatgcacacagagccttgggtcccacttcatacagggcccttagcagccagcattgcttagggttggctgtgtttggccttctcagaggccttactgttgggttcacatgtctgggttcagaaagggccctcgaaaccccacgattgtgaggatggttttgtgtgttgatcctttgttcttggaagagggcccctgattcaggaaatggggagaggccacaccctggtggtgtccttgggggcacggagcctgcgtggctgactctgggaggggcctgggtctgggtgcagcagtgcctgctggtgagggctccgggggctgacagttaaaacttttggaatcttctgaggactcagcggcttacggtgggaagcttgagattggccacagtagaggtacttgtgccccagcactcacagatgccacctcagggctcttctgtcctggacatcaggcttgtgggcaccatggcccagccccgggcttcgagccagatggatgccactgacgcctgctgctgcctgtctgtccttaggcaggtcatgtgacctctcagacgcagctttcatgcctgggaaatgggggtgactgtggtgtctgcctcaggggctgctgtgaagactccatgagatggagctggcggagggtggcctgggctggtccctacctgcactcagggccctggccgtgtgttgcccggtgagtgaaggatggcgaggcaggtccctaacagtgccatgtctctctttccaggtgaatgccacaggccaccagctgcagacagcggtacagtaccgggacctccctggcttctgttctgtaggagggctgcagcccccacactgtcagagcactttaggcagctgaatccgtgatttcagaagtgggtaatggataacacagcccattaatcaaactagaaccccctcgtaaacagccagagaaaaattagacataacaaaaaaagaccagctaggaaaaggtgcaccagcttcccaccgggctatgcccaccccagcccctgcagagatgtcctctccatccctctccagtccccactgcagtcacacgtcctgcatttgggccttgtccacatgcatttcatggtcactggctctgtgccgggcccctgctgagtctggggtttgggtgagtcacctcccccgccaggccccgatttcctccttgtgacaggaggagtgctgaacgaatcttgtgagatggtttcaaaagtgacgtgggagccaaccaatgtgaagtgctcaggtcagggctgaggacagggctttttccctgaaaggggcaaacatttcattgtcgcctcctgacggatttgggcatctggtgtattctaagtggaggctttcaaaatatcagaaaaaaaattctgggtaccaagtcaatgacatatgtaaaatgtctattttattttattttttatttatttatttttatttttagagatggaggtcttgctgtgttacccaggctggtctcaaactcctggcctcaagtgatcctcgcatctcagcctcccaaaatgctggaattacaggcgttagccaccttgcctggctgtaaaatgtggtgagcagggcaatgtgaggcagaaagaatcctgtcctttctagactttgacatgagacgtggcaaaatgtcatgacttgtcctatgcgatgccacatcgggaaagtccagctgaggaaaagaggagaaggccatctgggggtgcgagtgtggagccagcggctgcggggacacagtcagctcccgacggggctggagggccctgctaggccgatgagggccttaaagatggggcttttggagctaaacaaacagctgtgatgaggaagcaggaaggtgcccagcaacaatgaggaccctaccctctgcctgggcttacggcatccctgcgagctgcagagcagagatgagccggctgagccgcatctgtcattatccacttctcatccaagtcctgagccccaactgacccattagggtccccaaagacactagacgcccaaagcaggatgtgtcttttgggacgtctttgtgctgcggctgtggctcctgggtggtctgtgcctgtccctgcctaatgcagcatcagctggctgccttcacgggcccttgtgtggcacagctgctttgcagatggagacgccgaggctcagggcagcctgctgcggctggcttgctggtgggtagttgaatctggttggtcttaggctcctcctctggtctctcacaggctctgattcctgcacagtagctgttgtcctggtcctcccctgccagaccgtgggtgcccctccctgcaggccctggccctgcgtggggtcccctacgtaaatgtctgatgcgtgacggtcagggccactgcaggagggactgacctgccgaccctgcctccccagccacctgcgtggacctgcagctcaggacctgcagtgatgccgcctacaaccacaccaccttccccaacctgcttcagcaccggtcatgggaggtggtggaggccagctccgagtacatcctgctgagcgttctacaccagctcctggaaggccagtgcaacccggacctgcggctgctgggctgtgctgtgctggccccccggtgtgagggcggctgggtgcgcagaccctgccggcacatctgcgagggcctgcgggaggtctgccagcccgccttcgacgccattgacatggcctggccctacttccttgactgccaccgctacttcacgagagaggacgagggctgctatgacccgctggagaagcttcggggtaagggaaagtggcgggggcctgtgtggtcatggggtccaggtggtcaaggaggaccaagagccacactggaaggaacttgagggcttttccatcgacagtgacggtgcaggcattggtagagggcggggctgctccccgaggcagcatgttccccacaaaagggtgccaggcagggtcgggggctcagtgcagatggaggatcctctcgctgcccagggccccctagcagaagtctccagccccttagaggcaggctggggtggaagggtgctgagtccaagtgggggcagtgcccccgcccagggtgcagtgagcaggcctcgtgtgggggagcctgggctcagagtgcagggctggccctgggggtccagtcctcagccacagaccctccagaaccatagtgcttacccctggtcaagggggggcggggcatttacatcccccgggaggtctggcgggcaaagcttcacgattgctcatcgctgggcctggaagatcacacagagggtttggcttggagtgactcctccaagcagggtctgcaccgccctgtgggctcaaggagggagaggagctgtggagaaatgctttgatgtctcttgcagatgaaacagtggagggggagtgggcaagactgggccaccatgggccacttgtctctgaggtgtgcaaagaggtgccagagggccacttggcagcggggctggttgggggccctgcatggagtcccctgtgtctgttgtctcacgagtcggtgtccaccagagaccctgcatgatccgcagcagtcctggcccgttagacctttctgtgtaaaagaaatgttctattgtgttctgtccaagacagttaccactggccgcatgtggcccccaaggcttgggatgtggctcttgccactgaggcctggatgtgggcgtttcatcgcatttgaatgagtctgaacctgtctttgaagagcctagggccagtgtgtgccacattcaactgtgcagggcagtgtccgctcatggttgggttcagaggatctgactgcgggtgccacacatgtgctagctcacgcgagtctcacgacagccttgctccatggaagaggaagtggagcctcgggaagggtgacagcagtggggtctttagctggagtggcccaagcccattgcggatggagggatggatttggccatttgtcaaacagctaccgagcacccactgtacatgtggctttgtgctgggacattgaggagggcaggagaaggaaggcagacaaacacccgggccgggctccagcaagccctgggttccgggctatgtcaggtgctcagggctgaacctggcatgtcttgcagcctctggctcccaatctgagaagggtggaccctgggctcccatgcgatgcagcggtagggggggtgccctttgccagcaggtgggagccgtctgtctgcagagctcagtccctgtagaggtggtggagctgcctgtgggaggccagggaggcgaggaaggaagccaagcccacagccctgggaaagcccaaggagtcggttggagattattttgggcatctctaccaccaaattgccggcttcctctgctagtctttcccctggagaaccgttttgagcagaagcaaaaccacagggcaaggagaagcttagaggagcacattaactctctgtggacccaggaacagcctgcgggcacctgcgtcctgctcctgtgggcctgactgctgcaaagcccctggcggggtggagggagctaagcgtcatcggggtggccctcagggcacctctgttctagtggatgacaggatggtggggaagctggtgcgtatgtggtgtagagacgttcgtattctagttccagaacccctccctcttccccagcccccttttttcttcctcccccaagtacttcccagagcccccctttctgtttccttcctggacaggcactcactgttgtaccgatgaggttgtaacagaaacactgggaagcctcacagcagccggagggggcaccacaaggagccttcctgtttccaccattagccaagcaaatgaagcagaatactgaactgcctgagtgccactgtcatggaaaacacgcccaggaaaatcccctctgcacacccagcaggggtttgccttggggggtccaggaccccatatatctgtcttcctttctgttgtcctgctccgtattttaggagcttcccacagtggccccatagtatgtttactcacagtcacgttaggaaccatggcgctgtgctgtgtacatacctcaggtgccgtttggcttagatatcgttgtaggcactgcagagggaactctaattaaagatagagatgtccaagcatggctgtcgtgcagaggggactaagggtgctgtgtgtggtcagcgttcccaggcagtggtaggaagcctgggggcctgacactgactgagcccccccactgctcccccaggaggcctggaggctgacgaggcactgccctcagggctgccgcccaccttcatccgcttcagccaccactcctacgcccagatggtgcgtgtgctgaggcggacggcctcccgctgcgcccacgtggccaggacctacagcatcgggcgcagcttcgacggcagggagctgctggtcatcgagttctccagccgccccggccagcacgagctgagtgagtgcccttgggagagcctggcctggccccgtttcgggaaagggcttgggccgctccaccttcgggtgcacaagttggtggggtgtttggggtcctgggcagagctgggggcctcagggagctgcttggtgcaggccacgtcccgctgggcatgtgcaaccactatatgtataaagaagaatttctccagatatccatcttacttcaaaatgtagggtggcagactaggttatttcataataatggagacattgatctagtggctgaaaagatataaaacaaacaagaaattttattttatttttttgagacagagttttgctcttgttgcccaggctggagtgcagtggcacgatctcggctcactgcaacctctgcctcctgggttcaagcaattctcctgcctcagcctcccgagtagccgggactccaggcatgggccaccacaccaggccaatttttgtatttttagtagagacaggggtttcaccatgttggccaggctagtctcgaactcctgacctcaagtgatccgcccagctcggcctccccactcaaacagaatcggttattttagaagcagcctccatttgacccttggtcatcaccagttactgaaaaatgcacctgctctttgtttatggactcagggccttttcagtgctggcagcctcagccagtcttcatcctactggtctgggcagcatgaacaccatgagcccaaaggctctatctcttaccaggggccagaggccacctggccacaccctggcccccaaggctcactatgttccctctccaactgtaacatgctctgggcaggaggcagaggctctccctacagcactggaatttgagggcaagaggtgcccctgtgcagaaggccaagggaggtaaccagcgcagaaagctcccaggtcatttataccccgggatgtggcatctgaggaacacgggtgtttcctctcatccctggctgtccctgggccacacacagctggggagggagacatcattttccaggggagcaagtgcgaggcttagagaggaggagtgacttgcctgcagtcacacagccagtaaggccatggggcctggtccactcttcttcctatagtccattcatttattcatccatccatccatccatccatccatttattcattcagccattacacatccatccatcatccacccattcattcatacatccatgcatccatccactcatcatccatccatttatttacacacccatccatcatccgtccatccattcatgcatcaatttatccattatttcatccagccattattcactcatccatccatcattgatttatccatctatccattcatccatcattgatatatctatccatccagccatccagccagccattattcatccatccatccatccatccatccatcattgatatatccattcatccactcaagggccaaccaccttcccagctaagtaccaatgtgcactttgacttattacacaaacatgaagagagaccatcagttaaatttgcatgaatcaatgataacatatattattcatattcttgagttatgctaactaagaattctggctaggcataaaaaacgagcttaacaaaagtgatgaccttgatgagacctcattatatacagaggttcttgagtcaaaacaagtatgaattggtcccagcccatctggtcattcttgctgagtgggggggcctcatgcctttggggacccccggctttgagatgatgccccaagtctctgtatttgcccccagtggagcccgaggtgaagctcatcggcaacattcatggcaacgaggtggcgggccgggagatgctcatctacctagcccagtacctgtgctctgagtacctgcttggtaacccccgcatccagcgcctgctcaacaccacccgcatccacctgctgccctccatgaaccctgacggctatgaggtggcagctgccgaggtgagcgcccagatgcctggatcctgtgggccaccgcccgaaccaccccctcattcatccatttatgagtagtttatcccagcagtgcttcgttcctgcctctctaggagaggagcattcagcaggtgtcgatactggcaaacccctgcttcaggggctggggagaaggaaggcactgagaattctaggtgaattaaaaaggtgatgcgtgtgatagaggaaaatgatggaaagggagtcgatggtgcccgtgtgtgtcagcggggggtcagggtagctctcggggaggtgggcaacgagcagagcaggtgactgtcgagggcgccccactcagggggagcagccagggaaggccccaaggctgtgacatcagcaaggagccccggggtggagaggaggccaagggtcaggcatgcccccgagctcatcacataaagccgggggaaaccgcagcccctggccttgaccctcagcccagcgtgagacccatctggaaggaggagggtggggtgtgctgaccccacccagtcgggggttggccatgttttcagggtgccggctacaacgggtggacgagcgggaggcagaacgcgcagaacctggatctgaaccgaaatttcccggacctgacgtccgagtactaccggctggcggagacccgcggcgcacgcagcgaccacatccccatcccccagcactactggtggggtaaggtaggagccgccgctgcccatgctggtctccaccaaggcatccaggggtccctagttattccaggctctctggagttgtccttccctggggacaggagagcctggtgctccctccctgcctcagttacctgtctgtgaaatgggaacacctccttgctggggtgttggtgagattcagagattcatgttggaaacgcctagatccccgcaggggcccagtgatgggggccgagtccagctggtgcgttgatgtagagaccgttaatagtctgcaccattggagcccagagggctgctgaagcccagggcatggctgcgggccagtgggaaagcccagccctgagggcggcctcgtctgtcctgggcaggtggccccggagacaaaggcaatcatgaagtggatgcagaccataccctttgtgctctcagccagccttcatgggggcgacctggtggtgtcctaccccttcgacttctccaagcacccccaggaggagaagatgttttctcccacgcccgacgagaaggtgagagggctgtcgggtgtgtgcaggggagggagacagtgtgcgcggtccccttggagctggtgcccctccagtcctgagctcagtgaaggcaaagctcctaggaacctctactcagagcgggtcagcaccacctgctccaggcccagctctgcagggaagccccttcctcctggaagtctgtggcctcaggggccgtcgctcccctgatctccccgaggctggctgcactgtctttcacatgtccccgtctgggagctcctggggtggggaccctgcctcagcgctgctgttcctttgagctccgccccgcgcctggcggggtccccagtgcttcccaccgcagaggggtgcgtttccgggaggcgccggcagagggcagtgctgcagcgcgcatgctgcccgcccgtcctgcttcccgggggtcgtgcttgcttctcacgtgctgggctcctccggatggggaaggagttctggtcccaccgtccactgggccattaggtgaggccctcccttttccgggcctcagtttctcctactgttcgtagagcagcgggcgatgagacccgtgatgatgctgggaccctcccaacccaccctaaccttaggacgacctgctgggggagggcgcggagttggtccgttcccacactgtggataagaaagcggaggctgagggaggggttgtgatctgaggtgggccccagcctccagcccccagcccccagcccccagctgcggatcctggagcttagctgcctgaactgcccctagtggtccccactccaccggaggctgggcctgccctccacctggccccttgatggcccagagtcgctccccaggcttcgcgtggagagccaggcctgccctccacctccctccctgcactttcccttggtgtttgggggaaggagcagggagagagggactggccctgggtgggcaagtgccaggtgccgggcccctcataacagcagtcacacatcgtttgttctcctttctgaggccacccggccgagcacatagctgggcccctggttggcactcaggtatcagccctgcctcacctgggcccctccctgtcctggggccatcattgggaatgcaaacgggactggtccctgcgctgggggtcctcagtctagggtgggaaatggagccagaaactggcaaggagaagactgccagggctgcaggagggctgtgagtgcacgtgtgtgcgtgtgcatgcatgtgcacacgtgcatatgttggggtggggaacccccagcctggtctgggacttcaggagggcttccctgaggtggcggtttcccaaaaggtctccacaggtgaggtagagatttccagctgcagggcagggaggggcactggaggcacaggccacctggtgcagagaccaaggggagccccagggagccgggtgcaggggcccatgccgagtgctgtggcccagcaggaatggggagagcaagctgagcactctgcagaccaggggcagtgacagcaacacctgggccaccggcgcatttgtcctgcatttgttcattcttccacccattcactctttcacttgttcatcattcattaactcactccttcactcacccattcactccctccctccctcactccctcactcaccactcatacattcacccattcactcactcactcccttcctcactccctcactcattcactcatttactcattcacccactccctcactcattcactcacccattcactcaggcattcactcactccctcactcacttactcattcacttactcactcattgtcactcattcactcatcactcactcattctcttattcattcacacactaattttctcagtcattcatccattcactcatgcacttattcactcactttttcactcactcattctctcattcattcactcacaaactcattcactcactcttattctttcactcattggtttattcccgcactccttccctcactcattcattcattgactcttgcaggtagtgcacaccaagggtgcgaggggtgaggtgtctggttctctgctcagacctctgcaagtgcccgcagaggtgactgggcggcctccacttctggcctggccttgcacccctgtgctcttgggggccatggctgggcagggcaggtgtccccctctgcacaggcccagtgtgtctcagcctcagagctggcagggcagggcaggcatcccctctgcactggcccagtgtgtctcagcctcagaaccagatgtgagaagacgtccccaggggggatgttcaccccagtgagtcccatcagagccagagaaaataacactgtttccaagccatcaatcatcgggcagtgatcatgcagccctgtggccggcagtgatctctggaaaccagggtcccaggagaggcctgggtttggcaggggagcatgagaggggctggctggggtgtgccaaggtaccctttcaccaaacttccatggtgccctacggacgagagccagtgcctggggacagtgttcaaggccctgcaggctggccatggctgccttttgctgctccacacgtgcccctttgcccgaatcctgctcatgctgtgtcctgcctgccaacccctttctggctttgccaacgcttgctgtgggaatgagcatagccagtttcccaagggcttcctggggcaggagctgggtgggctgggtttcccacggtcctcagcctgtgtttctgggtccccattcagtcccagcttccctgctcccgcctggtttcatttatctgtgtctcttccttgcccatgtgcgcccagcctctggaccgacagctcctctgatgtccttgtcctgcacctgccctcccaggtcaggcctgtgttagccagatctgggcccctgcaccccagggttttggggactggtggtcggcagccaccttccatgccttagccctagagactgaccagtgatgggagggaggccccagggcaagggcagggaggagggactgtagggcagggaggccttgtgggtagaaagggtgacacggtgggttgggtcaggagcagactttggagagagtcttgtcccaccctcctaccccccgaggctacaccctgtcaagctgacggataaaggcaggtcagaggtgggacacaggtagaatgtagcagatgtggcctgggcagatggaccgtttgttggatgtgattcattcttgatgggaaagtccgctgaggcttcctgctatgaggcagggcaggccactcctgagctgatgctgccccacccacaggtgcaggggctgctggcaggatagtggtccatggtctgccaccctggaaccacagggcctgagtggggttgtgtttgtgcccttggtttgtgtctgtgggactgagtccagatggcacagcctcacttctgagaagctggacccattcctcaccaaccccaaacctcacgtctgggagtccgagtctcatgacccccaccagggagagatcttcactctggcctggagcaatcactcattcactcagtcactcactctttcactcattcactcactcattcactcattccctcactctttcacttgctcacgcattcgctcactcactcattcactcattcattcgctcattcactcactcactcactcactcactgggccctgcctgtccaccctctagtgtcctccactcctcctttctgacagagggagccccctcctcagcacagacctgtcctgcttggtggggccctgatgagctcatgcagggtgagcccttcgcctgcctgacccaccaggagcctctgcccaaggtcagtctgggacttacagacggcccagagcccccacaaaggaggatctgtggactctgcctgggggatgggcacaatgcggggaagctctgggctgggaagggaagcctgtggggagggacccaggatcccagccacacatccaaacatgtcaagggtggcagatcctgtgagctgtgttctgtccctctgccaactgcagtggaagctggagggtggggtagtcagggaggggcttcctgcaggctgagtcccagcctctgatggtgctggtcagcctggaggtggagtggggtggggaatgaagcagtgattattcatagaagtagttggctttggagatgaagtcggggaaaatgcagcccacccttgccttcactgctccaacagcctgggctttataaactgtcaagccaacctgcacacaccctgtggacaccatgtctgtgtgtaacctcaggagagaaagcccacactacccggccaggtgtgcagagtctcggtgattaccccagttacccatgggacctggccccgaactccagcagtgccagaccgcctgtgacccacctctgggccttcacatacactgtgtcctctgcaggacaccgttcccctctcctacctgcagacaccattcccctctcctatctgcaatgcaggtgtttgcacgcgcagctcctcccctcattgaccccagctcacaggacgtcctgcaggggaccctttccttatctgagccaggtttcttttccagatgttcaagctgctgtccagagcctacgctgacgtccaccccatgatgatggacaggtcggagaataggtgtggaggcaatttcctgaagagggggagcatcatcaacggggcggactggtacagcttcacgggaggtgcggcttccgcagggcgggactgggcggggggtggggggtgcaggggctgggtggggcaggggcaaggcgtaactccacggtctgctgctgggatccagctggagagcccggaagacagggcgatgcctcacctggtggagaggaggctggcgtgagttttgtttctgtcttgatgaaaagctgtcgtgtgactgttgtggaggacccaggcccgtggctcctgtagtttatttcatgaacactcaaatgtcacggtttcacccatgaccaatacctttgtgacattagggaagtggagttgccagatgaaatgctggacttccagttaaattggaattccagagagaccgtgaggaattgtttttaggacaatgtaaggatgttccaatgcgtgggatatgcttacaagaacccgcatggggtggactgatactacaattgtatctgtggtttctctggagcccgacttgaagcgtgtacatctttatctgctaaatttgcccttggggaggctgcacaggagcaatataatgggcatatgccactgtgtgtcctgaggggtacccgccagaccaggcacacatgctctgggccctgcctgcacctctccatgccggcacatcacagatgagagcgctgggctcagctgagagaaggacttgctggaggcccagggccacaggtggcagagccaggacccacgtggcatccccttctgccccctcttcccatgcaggcgggcagagaaggtggcacttcttgcacactctgaagccatcttcgcagcctgctctgaaaacttttctctcctgctcaatggttggcacctgtgatctttccctggtgcggcgcagcctctctcccttccagaacccaggcagagggccctcagcccccgtcatagccctgtgactggggtctgcaacagacacccacgagcagagctgggagaggcccctctctgttcctttttttttttttttttgagacggagtctcgctctgtcaccaggctggagcacagtggtgcgatcgcagctcactgcaatctctgcctcccgggttcaagcgattctcctgcctcagcctcccgagtagctgggattacaggcgcccaccaccacacccagctaatttttgtatttttagtagagatggggtttcaccatgttggccaggatggtcttgatctcctgacctcgtgatccgcctgcctcggactcccagagtgctgggattataggcgtgagccactgcacctggcctctgtccctcttgcccctgatacggccctgggaaagcatgaagccggggaccagagctagctggaccagagagacggtgactgtggctacactggggtctgggcagggactgtcaacagcagctgcaggctctgcggctcaggagccttgaacttcagaagggcgtgggctccctgtggcccccgacacagccagccctgtgggtgctatcatcctaggcctgccttggagatggtcatggcttctgctgaacaagaagctccaagagcagatggcacagagggcagaagcgggtatggctggggtcgacccagcttgctctgaggccttctcggctggccaggtggctggttgtccaccctagcctgggcccgtggtctccctgggagatggagctaataggaccaccctcctagactctggtcaggacagcgtctgggtaaatggacattgtcaccatggggtctccaggccagcagctgggatgccaggggcctgtgcggctgccccgtgctgtgggcttttctgttagaaaccgattcatccctgacctcaccagagacagcatgggggtggggaagcctgtggactttgccgccaagcggcctgagctcaagatgcagctctgcctcttcccattgcgggacccttaaatgcctcatgccgccatctgcggatctgcaaagtggggatcatatggtccaccttgcagttgttcagcccctcagctgcaggaggggcgtctgtggcgagtacctgctgcactcacctgcctgctgggcacttggctgacaccccgacgtcccggctgtctctgcgcggctgacaccccggcgtcccggctgtctctgtgcggctgacacccctgacgtcccggctgtctctgtgcggctgacacccctgacgtccccgctgtctctgtgccacaggcatgtccgatttcaactacctgcacaccaactgctttgagatcacggtagagctgggctgtgtgaagttcccccccgaggaggccctgtacatactctggcagcacaacaaggagtcactcctgaatttcgtggagacggtgagttctgacggtctcagggctctggtccagctgtggcctgggtggggtgggtcacattcaggcccccagggcagcccccgtagcctcactgccccatacacacatgctccttttgccaccacttgttttggggttaactgtccaccatgcacaacttgagatacagtagccggctctcctttgcgtgctctgtgggtgctggggtggcggtgccatgtgttggagtccctgtgagcaaggatgttacagcctaaagcagcacaattaaacaagggagcatgggcctgggcagcccggcgaggtgtctgacccagcctcagaggctgggggggcttcctggaggaggcagccgcagggcttcatcttgaagaagggtaggagaaatcaaaccacaggacagggagagctcccagcagaggggagcatgctagaaccccaaggggacatcaaaaccctcgagagccgctggggctgtggtgaggactcgagccgtgggatggggcgggcactgtgctccaggaggcgcagaagtgagggctctgggcagtggggtagctgtgtggttcaggcagggttttggggcctcagagtgaagggtataggcaggaagtggctggcagaggctgggggcggggcagggcgtcctgactgaggggtgactactatcgtgaggctgaggtcacccagaagcaggcaggtgggaggtgagtggggatggctgagaatgtgtctaaaatgaccccctcgctgccccagagagccaaggtctccctagcactcagtgtgagagtggggactctgtgcccatgtctgctccccttccagcacagctcacaccgagggtgctggggaccccaagaagggtccaggatgtcacagggaaggcagcctgcgttcgaagaagcttctgctatttttttcccaagcgttttcaagaatcacataaattgcatatgagcacagatgcccagtgagaagcaggcctcagaaagagggttgagctgcagcagcaaggagaggtgagggcgcagcaccgtacagttggcgcccacccacacagggcagccggttctgacaccaggccgggcggcagacggggccgtcccattttatagatggagttgaggttctggcctggggtctctgggccacacacaggcttgtgctccaggctcccaatgtctgcgagccagccagaggaggagacagagggtcagagagtgacatggcctgtctggtgtcgcccagatctgcttcttcccaagccctctgtccatgagccccctcctttctagaaaaatcaggaaccttcctccaagtaagaatcgagcgaactccctggggcagcagccgctgagataggaaagaaacaaagccccacacaaagtaaaatggaacattctgccatttgagtttctttctgatggctgtgccgcagccctgcaccacctgtggcgagtcccattcttctatgagctctcgcgccaggcctgtgcacattgcattttgcggctgtctgatgaacatgaggttgaaggagcctcggatgtggctggcattgctcctggatattacacatgaagtcttgggatatgaagatttacagcaagcgtggaccttggaaggctgggcagctcgctggctggctcttgagacggacgtcttacaggagacctgggcgcgggctcctgataaggatcaagcctgtcgtggccaattgaggcttttttcaaagtgatcctggccaggcctcgggtgggagtctacatcacctggggcgaggggaggggcggcgtggcagctctctttccccaccagagaaccgcatgtgccctgtgtttcatgaaggtgacccgtgggcccaagagcagggacagaaaaaaaatccgtccactgcaggctgatgctgagggcctcctgtaagagaccctcctgggagagcccctgctctcgggtggggctaggggaggcagaagtgagaccagggctggcagagaggaagactggggccgtggggccctggggtaggcccccagtgtggctggtcatcagggagggcttcctggaggaggaggagtgtgagctgtgttttgaagggagggaaggaatcggcccggtgaggggctggtgagggtattcttagcagagaaggctcagatgctgtctgggggtgaggaggagccacagggtggggtggctgaggggcatggtggcttctcgagctgtccagtttctcttcatcacctctcatgcaggaaaaccttactttttatgctctccctcccgctaaatgcgagtccatgagacattgtttcaggagtgcggttccattaagcagcgaagtgtggacaagagcatccagggtgggggtcacgagccccagagggcagggggcagtggctgtcagtccctctccatcgcgtcaggagggctgggaccccttgatgtgctcatcatggattccatgtgctctgggttcccgagatccctgtggcacagagataagtgctagcatgtgctttgtggagctagactgggtgcccactcccctctttcagccacctgcaccactgacagctgggcgtgagcctggaacagcagttaggtgccacagggtctgagctcacgggccgcgtgtgtcaggccagtcggtttctgcatcggtcacggcgggggtcagccgcggtgggattagagttcacatgcttgctgaaatcatcggtcctgcagaagccagagctgctttggcctcatgaacattttacagctgaggaaactgaggcacccagaagcaaaggtttgtctgaagtgaacagtcactacggcagagctgattttctggcccagagaaaaaccagcccctctcgggctaatgtcccggggccagggaaggaggatgctcctgttgccagggctgcttcctgaccctgtgggcccaggctctttgcttctgtggactcctccctccatataaagtatttaaaattatacaacagtcgacataaagatgaatatataggaaaacagtctctccaacctaaaatgttttgcttttatcctgattttaagaggagcaagatcattttcatagtttctggaagcacagcagggcctggctgggagccctttcccttgagaatctgttgctgctgagccccgtgcagggcccgggcagggggcagcctcgctggacggactcctctccccacaggcatcctggtcctgctcagcgtgaccttcagcatccttggaccccacgttgttttctgctgactagagcaggggccgtgtgggtggtttgtcatcaactgttttacaagaaatgtggacaggatcaggcagctttgggagggctttccagggtgaaaacgttggagctgtgggcgtgcagggagcttgtgtgttcaggaccagttcgtgccaaggccaggcaagcagtaagaaggcagggcgtgttatacacgtgtacgatgaagaaaccgcgctgctcgagcgagggtccgagcactgtcctcgtcctctcccatgcccacgccaccttcaggagcctcagctcagagggacccagggagtcccgctggggctgggaaggcagggaaggaatgccgatcaggcagaagagtggcaggaaagggttctctgctcaatgcccatagagatggagtcagccaggcctcgggtgagatgcagggtcattcaaaagcccagaacgtgctcgggtcaattgccagggaggaaactgaggcccagagaggggagtgactgactcgttaaagatggcagagcgagggctggcagagtggggctctgtggggtagttccccctagataccaagctctgaggagcatgtggggaacgagctgacggcctccacgctcagcaggagagctcacgccatctccctggcctccccttggtctcttcaggtgcaccggggcatcaaaggtgtggtgacagataaattcggcaagccagtcaaaaacgcccggatctcagtcaaaggcattcgccacgacatcaccacaggtgagcacgtccctggctgtcccctggggaccacgtctgccaaggaaatgccacaccgtggcagccggcaccctcaggcactcacagtgtgcccagccctcagcaggatggctccattcctccccaggctggctgggtcggggagggtgggcaggaaccagggtctgcgtctccttacagcatttggtgagggaagagcttgcccagccgtagctactgaatgatggtggatgcatgctctgtattcctaggaaaatgccgcctcctccaacattgccggggagagccacctccacccctaagcctgtttgtttctatcccaaagttcataccctgttgatagctggggtgtccagccctgtgcgggctctggctgtccttacaggaatttcacagccgatgaaaaatgacggtatgctgtgatatgtgttacctggcagagatgtggtccagagaagagggggacttttgctaactgtggggtgggtatggggggtgggagtggtcatcgaaggtttcagagaagaggggtgcctaagcagggttttgaggtataaataagagtttgacagagaaaaggggtgggaaggacgttccaggcccacacagaggcaagtgcacatttggcgcctgcctcccatgctaacctctccccactcatatccatcacccatcaccccgtggctgggtctgcagtcctcgtgagaatcatttttaatctatttgtccacagccccagatggtgactactggagactgctgcccccaggtatccacattgtcattgcccaagcccctggctacgccaaagtcatcaagaaagtcatcatccccgcccggatgaagagggctggccgtgtggacttcattctgcaacctctggggatgggacccaagaactttattcatgggctgcggaggactgggccccacgacccactgggaggtgccagctctttgggggaggccacggagcccgacccgctccgggcgcgcaggcagccctcggccgacgggagtaagccctggtggtggtcctacttcacatcgctgagcacccacaggccacgctggctgctcaagtactagccccggccccagcacccgccaggatgtggagaccgaggcccatctccgcatcccgggctcctggctcttgattttgtctgccacagacatcccacaaagccgctgccattttattaaagtgttttgatccactttgcactggaatgagaggatctgtgtaaggcactttccagggaaggctggggactgacccttgttgcctgagggcagctgtggcctgggcccacagggcaatcccgggcagctatcctgctgcccacaggtccggattgcaggcccgagactccagcctatctgtactgggccaggtggactagctggcttttcccagaccaccaggccttgaactgacttcagatgggaaactgaggtgggccaagggtgtgagcatctgtaggagctgagctccggatcctgcagctgaagctcatgtgtcctggagtgtagagaaggaggggcactgaatgggaggatgggggtgggcaggaggtgaccccaaggtagggtcaagagctcaagggcgggagagctggccagagcctggggcctcatggcatgatcggggggaccacactcaggctcacaggcttccaggggggcctggctccatgggcgtggatattcctgggacctccctcatcctgatcatgctacttgggtccagggaccctctcctgtcccctctctcaccatcgagaaagtctgtcagccccgggatcttccaggaaggggtcccgtagcctgagcagagaatgcagcagagaaggcacctgagccggccagggctgtgtcaaaaagcagcagagacctggcgcttcaacagcagaagtgtgtcctcccacagtcctgggggctgacgtcagagccatgtccccagggcgggctccttctggcaccacgctccctggctctttggcggtcatctttcccccactcttcccatcatcatccctctatgtgtctctgtccacatttcctcttcttgtattgggctagggcctaatataagaccctagcgaccctcattttaatttagttacctttacaaagatgctacctccaaataagatcacactgaggacctggggctaggacttcagcagatgaattttgtgggagggacatggttcagcccctaggagagggcagcatctcccatacagtggctcctcacatgctcctggctgtgccatcggcccccctggtttccagagctccaggcctgggcaggtccctccatggaactgggcatccactctgagcagtgccttgacctcaactgaatgacagcatggtccccaccagcaccctcagcctcgttccattgcctcctggcagctatgccctgaggcgaaggcctcggggttcccagctgaagcccagaggagcaggcacacccccggcgctgggtggcgtgctctcgggggaaggcatggggagggctcaggcagcctacagccctcaagtcttacactggcacaacagcgcttggtttgcggagcaagaatgatctggagtgtttggggaacatctcacagcctcctgagcccctgcatcctacattcacccatgcgcctagtgacttgtaagtttacatttatttggctccactgcatacagggcaccgtgcaggggtcctctgaa

SEQ ID NO: 128 - DNA, 149048 bp, Homo sapiens
  source 1..149048: mol_type = genomic DNA
agctcaggtcatcctgactccctgtaccacctgtgctatatcctctcacttcaccctcagatccaggactgtggggtgtagatgggggccttgtaatcctttgtacctaatttcccaactgcatttctaagagcagagcttcagaaagttcaccctgtgaggcagcctgtttccttgctagacagcactgttggagataaactcctccgttgggataaattgaaatcctttcgctctgccatcaccagttctaatccggccctcctgagtccctcagaataagcttaaagccaaagtcagcccttcatccccgaactgcatactcaggttccctctccagcgccaatccttctatgctgatttctagtctttaccgtaaattattacaatgcaaatctctgcaaaaccaacatatttctgggtgttaattaatgtatctcctgctatagtcaatgcaacaaaattccaggaaccacacaagatttttgccacttgtttctgttgttgttgtcattcaacacactctgacgatctactctggagctaggcgaggggctcctgttggcatacaggatatgaaagtctgtcgaccagaagcttgtctacagggtgcggggccacactcaacagagaagcatgttcgtgggcaggggtagaaggtcgaggagcactgagcaccctcccactgcggagctgagagtcgggtgaggtggggtgaggccctcaggggaaggagggtgggagttatggtagaggcatttgtacggcatgttaatttctgcttgtgcatttctagctgtttcctcccctgaagcacagtgaagcaccaaatcctgtacgtgagcttgtcttcctttccagctctctcatctcttaatataacctgagaccaacactgagcgtcttacagcttcagttgctggggatcaaagagaattgaatccttccttcattcatggaacacaaatgttgtgacagtgtttcttcttaaaattttttattgtggtaaaatatacataccataaaatttacaattttaaccatttaaaaatgtacaattcaacgtcattaagtatattcccaatagtgtgtgcaaccatcaccaccatccatctccagaactctgtcatcatcccagtgtgaaagtgttttagaaaccatatatgtaaaggcaggtcaattaggaatgtgctagctgaagtcttgaccggacagcaaattcatccatccacctacctactgtgtttatgtaccaggcttgataaatacagaaacaaatgagaccagaactacaaggtaagaaccttgtcgtctgtgatgctgggccccctgtcctacttcaaaacagagtgggaagatagaaaggattcttagatgagtctctaattgaaggaattcaagttttacttattctcctttcccagggaaatgggaggtgctctcacccatggcctcagcctttccagttaccaagaggtgtgggattttctctctcttttgtatattgttttgttctggtctcttgcatggggagacagaggacgatgtaataactatcatttgtttagagcctttcagctgactaagctctttcccaggagttctcttttgaccttcacacgagcctgcgagggagtaaggcagagagcactattttgcagatttgaaagcaggctcagaacatcaagcagctccaggttttgcccagggccacacaacttgtgtgcaggtccttattctgagcaggcctttggggctagaggaagccgctgagagagccacagctgggtaagggcaagggaggctgctttcacaacaggaaggaggagaacagggcagggaagcatcttttgtgtagaggcgtggagcccaagtcacattgagttgttgagctgcctgtgggtaatggattgctactagtggcagctggggaggccgcggggtgttgagacggatgctttgttgggcaccacactgtctgaaaggcaattgaatcgcagcagctggaacatgccaacactttgtttcaaaagtaagcagcagcaactcattggcatcagtgaggcaaatcctaaggtctacctaggccacaggttagggacctgggactccagtggagcagctcaccaggggatgggccttgttcctgagaaaggatgctctgctctcacttgttcctacaagttgaatgttatttgtcagacactggaccaaacatgtggccacagagatgaatgctcctgccctcaggagctcagtccagtgcctctaaattattagagccctgtgggcagtgtgtatgaacaagcaccatacagaatggcgcaatttgcttcagtgcagagtggcctggagagcccatgcgcctgatgttgggccacaccctgacactctgcccttgacctagtgcagcacgtgctcagtgaatcccagttcccatcatgtttcccaaattcattctgagcttcacatgttttgatttctatttataaatgtttctttaaaaatcccattctctctgtctatggtcttcaggcatttttgcttagcaccgcagtgttgtttatgggtggtatttgttataggtcagatggatccactcataattcattatgatagcacaggcctcactggtcctaggagtcctgagttgctgggagaggagtctcccggtgctacgacaagagcctgcaagtaccacgttcaaaccagagccaaagccttgatgaagtcccagctctgagagggggtcagttcttggacctgactcagccctagccccagaacgataaatgacacactttgcccaagctcctcagtttctacattggtttcgggtcctctgccaagcaccatatggtttcccaatccctgtcatttctagcaatgttctccctaagtagggcactttgattaaattggttccactgaattgtagaaaaggtggagttatgatgttctttgtcactgctattgttagtaattaatatgtctattaatagaaacatcaacagagttaggaagtgggggaggagatttagaaggtggttgtatcctgttaaccctctcccctgccagataagaagggacagaataaccaataaagtaaaaatcccatggcttttgactaaactttgttggaatttgtgcagcctctttctgctccccagaggaagggaggagaggtggcagtgctcctagggccagctcagaaaccaagctcgggctttgatcacaaccagcaacaacaggctacttaagtcttgggttttgtatgcatgtgtacccataatttcattattttgaagtaattaagctggcttttttaaagaaaagcttcagatttgccctgatttgcagtcttcccctgcaatcccttttgagtaaagctttgcaggatgactgaattcttagaaggacagggaagattgtctgagcacgtctggcctctctttacttcccctgagagaccggataactccttgggcagctcacctcctccagaagggcaatagaagctcaggaagaggggaggcgttctcagacctgaagggcctcctccttcttagaatccagaagaaacgagagaccttagagaggagggtagaggtcaagctaaagaaaaaggccagagtcctagctgggttgtgtgaagtaggagaaagaaagcagagatcggcaagcagaatttggtttgtgcacaggacaggtggctaccaatcttactctttgagactttaagctattttaaatatgtgtaaagacctaaagtaaatcatgtctaaagaactaaaggcaagtgtgaggataatgtctcaccaaatagagaatactgatgaagacagagaaattataataaggaaccaaattctggaaatgaaaagtacaataatggaaaagaaaaattcactagacaggcccaacagcatatctgaacaggcagaagaaagaactagtgagcctaaagatcagtcaattgagattacccaatctgaggaacataaagaaaaaagaatgaataataataaacagagcctcagaaacctgtgagacaccatcaagcatgtcaaacgcacataacgggaaccccagaaggaaaggagagaaagaagtagaaagaatatttgaagaaataaggaccaaaatctcccccaatttcatgaaaactattaatctgcacattcaagaagctcaacaatctccaagtgggataaacttaaaaagatccatagctgcacatgtcaaaatgaaaccattgaaaaacaaagacaaagaattttgaaagcacaaagagagaaacaattcatcaaatagaagggttcctcaatgataccaacagctaattttacatcagaaaccatgaaggctggaaacagtgggatgacacagtcaaagttctttaaaaaaaaaaaaaagctgtcaatcaaaaattctatatctggcaaaactatccttcaaaaatgaaggataaattaagacatttccagataaactgagaaactttatctctaacaagagagtttgtctctaacaagcctgccctacaaaaaatagtaaaagcaatccttcaggctgaaatgcaaaggcacaagatagtaatgtggatcaacatgaagaaataaagagtgctaggaaaagaaattatgaagtcagatataaaacaatacaaatttattttttgttggtaactctttttttctgatttaaataaaatgtgtatggcaataattataaatgtatgttgatgggcacaaaatgtattaagatgaaatttgtgacaataatagcatatgggaggggaaaacaggaccactttagagcaacatttttgtatacttgaaattaagctggtattaacatgaacagatggttataaattcagatattaatggtaatccccagggcaactaccaagagaataattcaaaaatatatagtaaatgaaacaagagaatgaaagaaaatatctatttaacataaaagaaggcagtaatgaaagaacatgagatttaaaaagacatatgatgtatagaaaataaatagcaaagtggcagacaaatcttactttttcaattatattaaatgcacataaattaaactttccaattaagagattggaagaatagatttaaaaaacatgatccaactatacgctgtctccaagagactcactttagatttaaaagtacaactagattgaaattaaaaggatgtaaaagataaagatatacaatgcaaacagcaataaaaagagagctgaagtggctacactaatatcagacaaaattggcacggtggctcacacctgtaatcccagcactttgggaggccgaggcaggcagatcacctgaggtcaggagctcaagaccagcctggccaacatggtgaaaccccatctctactaaaaatacaaaaaaattagccaggcgtggtggtgggtgcctgtagtctcagcaactcgggaggctgaggcaggagaatcgcttgaacctgggaggtggaggttgtggcgagccgagatcacgccactgcactccagcctgggcaacaagagggaaattgcatctcaaaaaaaataaaataaaataaatcaagtttgagacaaaaattgttaccaaagacaaacaaggacactttataatgataaagggtcaatccatccagaagaaatcactattataaatatatttcaacctagcaataaagccccaaaatacatgaagcaaactgaggtctttgagaatagagaaggcagctttgtcctaaatatttgactgccataacctattatagtggttaatatccaataactagggactcattccttggagttaaaggtttgcctcccctacagttcttcgttaaagtataaatatgtccctggaagccaccaattgtgttgcaattccatttagctgaagttggtttaagctccgttggagcagtgactgctagtgacagagacaaacggttgagccatttttgatagattatataggtatggcctggcctgggcccaggaggaaagcagggagaagaagcatctcagagtgggtagaagtattaagaatagagaaagagtataggatgaggagcagggagaaagctaaggtatcacaggggcacaaaaaaagtatcgcaggggaacaaaaaaagtcccacagagagtgtgggaaacaaatgctagacaaggagcaaagcaactggggcactgcgttgtgatgaggttcttggtttggcaactcagcactgagggcagcatcagcccctagaagaagcaaaaggtataagaacagggaagcaggcaagagccggggatggcaatgagcacaggccattcattggtaaatacccaggagttgtgaccaggtctgagctgccgagtgattcctggactaccacagagagggagggagagagggctgggtgctgagatcaggcaacaggcactggaaggcataggcactgatagaaaaaccaggaaactaggaaactcataggaacaaagaacagcaagaggcaagccagatatgagctcagaactcaggcaaacgggctgggcaaacagatgctcaaatgaggttgtgtttgtgaaagtgcccagttctgggcagatgcttagtaactgttagctggttctaaatataaaactgaagcaaggcaagtggccaggacagcaactcaatgttgacaacaaaaatagcccctacgtattaacacctcttatattctgggcacgttgctaggtactttacatacattacctcatctaatactaaaatgaccctgtgaggtacacatcgaaaattccagtctatagatgaatgtggatcctggttaagtgacttgctcaaggccattacaacgatgtgaatgacacagagccagaagtttcctctggcagcctctgggccacagtgacagcccagggtggctctgatcaacatggtggcttaaaaggaatgggaggaggggagctgagagctggggacaaggaacttctcagagttcctctggagtcccaatcctccactttttttaaagacagaacctcactctgtccctcaggctggagtgcagtggcaccatcatagctcactttaacctcaaactcctgggctcaggtgatcctcctggctcagcctcctgagtagctaaagctacaggctcacgccaccatgctctgctaattttctatttatttatttatttatttatttatttatttatttatttatttatttattgtagtggtcgggtcttgctgtgttactcaggctggtgtcaaacttctggtctcaaatgatcctctgactcagctgggattacaggtgtgagccaccacactcggccccctcctctttttaaaaggggggttggggaagagagcatcagaggcctgaagaccctccctgctcctttctctctcctttgaagaatcgtggtgatttatcccacatgccagaaggccaggcactaggtcactagggccacccttccctgccttaaaccttgcatggcctgtttctaaatggaagaatgcagtggaaagcaggggcaaggaattaggaataaagacacttgtggggttagggaaccccaggaatggtctgtttgccccataaatcccaatagctatatctgctttctgtcaaaagcagaagagtgagcttacttcctccatggccaccatgatcttctatccttcctttcccttcccgcacatgacacacacaacacacacgtgcatgcgcgcacacacacacacacacacacacacacattggagggccacctctgggtgacccatgcatcccctctccctgcctcatcctattagtgggaccaccaccactgctcttccctaggggaagggagtttcctgtgaattctctttaaccttggactggggtccagggccagcctatgatggaaaataaatatgtcatcctgtgcatctgagcaagagctcaaagcatcggataccccatcccctcattttactgatgtggtgaggaccaaggagggagcgggcttgcttaggatcacggagcgccttctggtacccagtcctcatttttgttccgcaccctccacgggctctctggttcctgcaagtgctcagtgaaagacagaagtctgcaaaaaagaggtaggtacttgcctggtgacccagagagcctctgactgttttgggagtctggaaggaggctattggaacgccttgagaactctggccagtggcctctcccccatccacgtggctgtgtggggttgtcttcaactatcttgttggaagcctgtggacactttctgcccctctccctctctgtgtgccccacttgggtgtggaccacccactttcctgtgggggcctgggtctgcaggcccagtgattggcagttgtctttgtaataactttcattcgacttcctactcagggcaagagtgctgtaacagctggctagtgatgccggagctggctgggaacccaccaccacccagctgcaggaatctcacggggcccagatcattcccccagtccaaatgccctgtgctattgcaatcgggggtgctgaagccagcagctacattctgttcacttctcaaacaccagcaaaatgtcaacatcacagccacactgaaaaaaaaatacagtgttctgaaataaagtaaaagaaaataaaatgaagtcagtaactatggccctcgcgctgggccccactgcctgcatgtcagtctaccctgttaatcatcacgtatgatttttcaaagatctattttgagaaacatttagaaaatggcttgtatatagctatatatgcctcatttataccctccagaaatggtcgctctgtttagcggcagatggcttttcttccactagttctcttttcatttctcagtcaaagttaagtaggaagtcaacctactccctaaccccaggcacacacttatcacccacagtccaccctggagtcagggttgtaggtggggggtgagaaggaaaggctgtgggttctccctaaggcactgttccacaaaacccaaggggacaaaggcagcgggcatggtgctgagagggaaggctcaaagctgggattaaggaaagagcagagcccctgggtagggggtagaataggatgtggctgccctggtttgctgcagtcaacaactcgggtatctcaaggtccacgaagcatgtataagactatccctttggccgccgcagaacaggggccaagaaagattaactaccccggtggcacctgagtgctgtacctttggcctgcaggaagccgcaagtcgagccctgcatagttgtcacggcaacagcagtgctgaggctcctaagggcaaggggaggagaagggggcgtggagaaggcacgtggtggcttttctggaaaagcccatctgtttctttcccctaggaaactaagtcggggaaaacaacaacaacaacaaagcagggacaggcatctggggtctagaaagagaaaggagagaaaagactctgagatgctccaagagcagctctcctgatgggatgtgcttcccttccttttgggggaggtgagtgactgacaaagaaaaggactgggcgggccccggtgggtggcatctgtgcaggagccgtgtgcaggatcagggcaggctctgtgacctcaggtttgctgggggcagtccttgtaggaccctatcagccacagcaggatttcttcttagcagggtggccgacctgaatggtgtcctctctcactgtgtcttcttgctccttgaggaacctgggagaggggaagagatcgtgtcagtgatggagaagttgataggcccaggggctggcaacctggacaagctaccctcaggttacaggtcatctgggccatatggagagaacccaccctcaccacggcatcagagagagtcctgaacatccccccctggacagtacaggtgcacagctgtaattgtaaagccagagagtttagttgacatggatccttcaagacacctcctccaggaagcctctcctgatcctctaggtaagcctaagtgcccctgacagcatctgacccttcctctgtcatgaccccatcacccagtgtcacaatgcgtgacttccctggctgtctccctcggcagaaaatgagttgcttgggactgagacttatcttttgtctctgtgcctctgcagcttatcacagtaaccagcacacaggtgaggctccaaaatatactgatgggtcgtaacctctgcagtagggctgtgccatgtggccacagctccagattaattgtaggaggtgaggaattaaaaataatggtaaacacctgtctcttctctatactttccaaacgcttttgcgttacgcacctcctttgattctctcaacaacctgtgagtgggcaggaaaggaaggtgtgattgatgttcctaccttcctgacaaagctcagagaggcagggcatttgcccagggagtcaggggcagagaaaagcctagaatgtttccttgtgatactccataaccctataacctcgccaatgcatagaggagttgttctgggctcttaattactcaaagaaaaatatttttaagtgccccagaatgagtgctgagcacaaaatgggctctgttaagtatttgctggacggatgaatagatggaatgaaatgaaggcctagatggatgaatgaatgagtgaattcttaagtatcagaaatgagtcccagcatggttttgttgtttaaatttttggtgtaggcagggccttaaggaaccagtcttttcatgctaccagcaccattaccttggttacctcccattgatttcccatcacagcccctcttctttctggtttctacacccactccttcctcccacacccaggaactcatattataacccattcttgcctccagctggcttccagctagtccctgctaagacatcagccagtgctgaggggcctctgatctggccttcccccagaaggattggcatttaaaaagagcatccctaggaaaaggcagcctttaagactaagaagaagactgcaatgggggtgacaggtagggatgctttctttcccaacatcattgtttcagaaagctgctcctgatgttgcaatcccatacaaaggcccaggaccccgttgcctatactcagagggctctggccaatagggaggaaggggggtcagaggtgtggcctgggtggagggaaacacggtgcctccctgaaggcagacacagctggacacagcagttactgcacctggggagcacatctctttacctggccagatggagcagggactctttggtgttgtgaccagagtaggcgctgcattcatagaagatcagattgttctcctagaatcataaaacagagcgaatacaagagtattggagtgagaggggattgtggggggtggtgggagagcccccttgtgcatctacctacagccttcacttcctctcgcagccccttgaccttcctcataatccttccccactctgtacatggctgatttctgtctccacagcctccctgacaatgcaagctctgtaaccatctcccaggtgagctataacaattgtaaaacaatgaaaccatacgctgtcttagttcctctttacactttcccaaattcctctcaagtacacacatgctcattccaggttacaccagccctgtgattcaggcaaagacacaaaggccagggtgggcaatattcttccccctttcacaggcagataagctgtagtgagagagggcacttggctggcttgttcagtcccacattgagttaatggcagagctccttgcagcatgcttttcccaagacagtggcattccataggccttggggacaggtgtcatgaggcactccggtaggaattctctttcgcaccagttaattaatactctagctgccctggctgtcagcactggtgcaccagactggccgtcagctcattaggatgaggttgtgctgcctgcatggtgcgggagcccttggttaaggctcatcatattccattgatcactcccattaatagattactggtgtcattatgacaatgctgatggcacagggccctggcttttagatggcctgttcttggaggctgatgccctgaggggatgcaggccagttgagtgaggacagttctgtggctgtagctcaggaggctctgccatgctcccagtgcagctttccccatctacacccacaggccagctcgaccctctgcccttttcacccagccccatgggctctatttctccttgtctgcatttctctcagatctgcaatctcttgggtcagtctgtcaaagagtagaagttccatggggtgggaatagtggggaggggagagaaggacataggacttagaactggaagacatgatttgccttcctgctttgagttctgaccccacctcgggtgagctgtgataatacgaatgtatcacttaactcccgagtcttagtttttttttcactaacaaaaaaaaaaaagaaaagaaaagagaatggatagaatctttgggtccaggtatattttgaaatccagaattttctgaatcttagaaaggtaatacatgtatataccatatattatataataccctcagtggatttcagacagcactctataatcaaatatattactatttcttcagtgaaacctttgactattcactcaaagtgaggttacaaccatgaatagcctcgtgtcatttctggtcagatttttctgccagataaaatacaaaacaaccctttctgttttcagagctttttggatttcggaattgtggacatgtaactgtctagtgaccctccatgtagatacctgccaggcccttcctcctcctttttccttgagtcttaccatctgtgctcgttctcccaggctctgaactcatgaaacgctgtttaggatgagcatgcaaagaattacagaatcatggggctggtaagcaccccaacctcccagacacacagttccatgaaaacaaactctgaggcagtaaaagaagccaaggaaccacattttgttgcctgatttccattaagccccattgattccatttttgagcaaggggctccatgctttttaatggtaggttttccagtgtgtctcctgagtttatcttgagttcatgactttgaggctcaatcctgacaaaaaggatgaactctctaacacagtggtctgcagaagaatacactgctttgcagagagtgagtttttcatccctgggggtgatcaagtggaaatgcagattggagggggattgaaataagtaaactattgctatcttagaatgtatacttctgagttacaaggaagggactttaggataattccccatgccctagtggtccctaaccaactccatcttgcaacctgtggctttctatgcaaagttctacatgcacaggagctgagccattcccaggataccaagacacccatgttttccagttgcttccttcccatggcacttccagagaaagtccccaccaaggctcttgggcacttgcccaacttccctcggggtcacactctgtccagagagatggaaatgcttgctctttaccgtggcaagctgctctccgaggccccgggggacttcccgctccttctcgttgtcaagcttattacccagcagaagaacaggcacccggtctcccacagcttcctgcagaacagaaaatgttttcaactgagaggggtgtcataggattgcccagagggcaggctaacaatgccggctggacagatgggacctcgcttgagaatcccctgctgccataaaaggtgaggccgtaacagagtcatcctgaaagcagaaaacagccgccttctccaagagcctcagtttatcatgcttttgcaaggtgcctgaggcctgcctgtggtgtctcctagtccctgtgtgtgcaatgaccgctcccccttcacgatgctccttggatcttagatggaacagcaggccccccaaggtgtgctggatgaggggacagttgatgccaacaggctgcatgcctccttccagagcttacagcaccctgagggcgtgcctaattggccaggcttagtccgatggaccaaggccatgaatgccccatggtttggagttgttctggaggctgctttgattagaaactgcatcactagaggcctcctgattgcacataagcttctgagggttggatccaaatctgcctcatggtcttgcgcccacaaggctccataaatgactgccatgtgccttgctggaggctggcaccacagacccctgtcactgggcgctttggctctgaagaaagccctgtgtaagaaggaacactgtggccatagcagctgcactgcttgggccagaagtcacaggtttattcaaggtatcacattgtttacttccccaatggctgtggcttaccagccaggggcctgcttcccgggtctccacctcctccctggtgaaaggggcaccgtgtgtgtctctcctgagggcgcccaaagggcccgggaccaccgactgccattcagtgagtaaatgtggtaatgtgcacattgaagaaggttgttatttttacttaaatatttaattaggggcttttaatcataatttagtaacaaatagttattcattgtagctaaatgttttactaaatagcgggacctgtgggataacagaagctaataagcagttacagttttgccaatactttagctgttttacttgagcatttcaaataaatgtccaaagtccatcttacagatataccaattttaaatttaaatgctattatgtttgaaattaagcctcaatgtttccttaatctgtgcattcgtttttactgccatttaataggggaaaaaaattcttatttaacaaatgagaaagttaaggctcagagaatcaaaaagaacattcaacaccataagcactgaattatgagaactctttagtatatgggtcctcacttctccaaccttttcctctagattcttatttccaatcaagtctctgctacttagtatcttattaactggaaccctctaaaaatggtatctattggtcagatggtaacttgtgtttgcaatgatgactcaaaggcgctacaagatcttacagtgtcttctgacccatcaaaaatagattaaattctggacactgcagttgatgtcctaagtggattgtacatattccaactacttgaaagtgagaaagccactgatggcatatatggaaccctgtggccccctattagctagagcgttcactaatgggaacaccccctcctctgaccgtgctgtgccacgggatacttgtgcgaagagcttttcacggaaagggaagaaaggaggaggaagcagggaaatgggccaagcggcttgctgtttagagcacatgggagagagatatttgtagatttatgtgtgaggaatgattaaggcttgtgggatttcttgacatggaaactctgaaaatatgagcatcagacttgaaatcccagggcagaattctaccccaggttttggtattatttggaatgggcactggcttctgtttcctcgcttgcagaggggatgatggatactgaatgacccaataggatggggtagggaatgggtcataagcccaacatctgggtcctatgcaccataaacagcaatggtgcctcttgcgtcctgggaaaagaaagggcaggtttcttctttttttttttttttgggaggccgaggtgggtggatcatgaggtcaggagttcaagaccagcctggccaagatggtgaaaccctgtctctactaaaaatacaaaatttagccaggtgtggtggtgggcacctgtagtcccagctacttgggaggctgaggcagagaattgcttcaacctgggaggcggagcttgcagtgagccaagattgtgccactgcactccagcctcagtgacagagagagactctgtcaaaaaaaaaaaaaaaaaaaaaaaaaaaaaaaaaccaaagcaattcctggatataaaaataaaggagcttagaaggagcagaaaaaaaaaatttaaaagcaaagcactcagcaggagctgcggtttctgttctttgtattgttcctctcttacacagccactctggacaactggcttccctgcagggaccctggcctgccaccgataaaggagaaacagactcatctccaaatatttggcaaaaataaatgagaatacccataagaccagggagtgtgctaactatcacagtcagtcaccatcaccctggcccaaggtcatcagtctctggcacaggggcagggagaggagctggtattggggtaggtgtctcatggtcctctctgactttgaccccaaaagtctggaactatctgtctaaactttacacctttctcatacctaactaggttttcagcctgcataccactcagcacaagatgttcaaaattacctcctagatgaagcaacacctccttcaagcccctagggctttggtgaacaggtctcaggtctactcaaactctgttgtcttgagactgtgagagatgttggtaaaaatcccatcagcatgacaggttggagtgaagtcatcttagctccttcatcaggcacacaatctctctttaggagatgtgggttctgccctagctctgtcaccatctctccatgtgactcatctgagtctctcctcttttctgtgtctctctgttccaaagccaggttctgttctatgaccctctaacagagagccttccctccaccttcagttatttcagctgcctttctgtgaacttgagcttgttggaagacagacttgttgaaattcaaaagatcacccatctctgactttaaataacaagagctgtcaacttggagcagtggattggcattcagctcagaatgtgcagctgctgggtttggttggttgttgcctatgtgcatgtgtgtgtgtgtgtgtgcgtgcgttttaatatctatttgctaggaggcatgaaaaagcacttagctgggatagtgctgctatttctctggagctagagcaaaaattttttcagcacattaaagcatgcagttatgctaagaaaaaaaatgcctgcaaaattatatcttgggggtttccatatttatccatcccctggactatgagtcaaaacaagatttatttgtgtggttcattttaaactgccagcacttcaagctcaacttggaacgtggagaaaaaaaaatcaaactgctattttttgcaccatgctgtacattgtcaccaatgacaaagatcgcagaatgaggtttagctagcagcccaggaagggagagggaagtgggccaggaccccttgagctgaagaactgttctgctttgagagagaagcaagaaggactgaaaagtaaatgaacacctgcttttcaggagcagatttcagccatggaccacaggacaagagagaagcagtgcagtgtggcaaagccctcgcttctagatcgggtggtgctgctgacaagtgtgggcgcctttgggaaagtcacttcctctttttggatcatagtttttcttacttataaaacaagaggttgcattagattaatctccacgtttttttccagctcggaaacactggtctattcggcttaactccgccaattctatttcacttcctcgactcacatgcccaggaatctagtgccatcagaacgacaagaggctctaaacaagaagctcagcatcccaggactgcagacactgggggccagcaatccggctctgggggaaataccagcccatacaggcttgtacaggctggcgttctaatttctattttctctacccgacacaggccccagagtcttctgatgtccagtttgtcccatggccacacgtggggccttagagcctgactagtttcttttccagattggaatggttaaaccaattctacccaattgagataagaaattgggggtgggttggaaatgccgagttggccgaaagactgcctgcggtgacttcctataaggcactcaggagaatcggcacagagggcatctgctgggcctcttctgcagaaggcctgcaggcaaggtaaagttgcctagactgggtgaaatagcagaacaagggcaaggccacagtcttcccatctcatcaagcagtgctggtgctctcttgcaccaaaggattttggttccctctgggctggaaggaccctccagaatctcctcatccacacacattcctgctccgtcttggcctcccagagagatagtcaaatgccatcatacactgtagaaatttaggggccaggagggagcatttggtctgctgccttgttgaatgattggccaaagtttcatggccaggaagtgatcaagatgggatagtaagaacttcctttcagggaactccactacctcccccgagcatctgttcccaccccacacaacctcttccaagagtctttcccatgcaggcatgtacagcaactgaagcccttttttcttgtatgcttttcaggttgagggaggaagggggactgtgaacagctggccaccattcacttactaataaggcttcagaaccttgaagactgttattaaagctccccctccaccctcccttctccaggcgagggagttggtaaagtgctcagagctctttggaaaaataaggtgctccacaaatataaggtacttattattttcagttcccctcagatcaaattaggtgtcaagttttaatctatcacctgacacctctgattgctggttgccaaggcagaatgacttagcttttcaagaatctagagaataattgcatttatgatgccaccgttccacaccttcaacacacactctgccatttgacacagcctcctgcacttgtttctgaaactctgtgctgctgaactgaacgcattgcctggtctatcatactgagtcccagagctcctagtgtgtgctggacatgccgcagatgtgtagtaaaaccttggtgaggggtcacaggcatcttcggaaatgacttagagctcttctactcacagggtcatccctggaccaccagcatcagcctcacatgagaacttgctagaaacacagaatctcagaccccagtcccgacctgctgaagcagagactgcattttaagaagttccccaggagagtcctatatatgttagggttcaaggagcgcttgtttagccgggaacagtggtggctgagaatcaaaattccctggggagctgttcgttttattttttatttgcaggctctgaaccactctgggagagaaggccctggcccctggcctctgttccctttaaaagctccacgtgtgatcctgatgttcacccaggtttagaataatcaattagagcttaaatgtacctttggctaatatcttaaaaaaaaggaaaaactcaaactagaaatcatatagaaaagccctgtttacacataagcaattctgatttaactatgtatagatttgccatctcagccaggcttcccgagcccacagacacaccaaggcttccgtgggcctcttagcagccacacgccgctgatgatttcagccccgtcccacaaagcaacgtctctggaggatgactaaactgatgcttcaagctgtgatgatggtcttctgagatgtcttcacctccaccaccaaactgttccacctcttcttctagatcccaggctctgtgcaaaacaggagccttagaaacgacaccccctaatgacagcagagagcgtagttccccaaatttgtcaccatccattcccattaatcccagaccacctggaggcttagccctagcacacaccaaaatttagatactgggggacaactaaatgtctgtgaaaaggacaggtgaccctggagaagttaggccttccctttcttcacttttgaatgagatggccatactagatgggagattttcaaagggaaactcttttgtctaacaaaattgtagctgacctccaatatgctgaaaaaggcaaggcagctctgacggagatgggggatgagggacctggatccgtgaccactaaaccttcccttgccgctccccaatctctggggaatgtcagtctgattccagggctccaaggaagagagtctggaaacccctggattaggtaatccctaacatccctcctggtgcttaacttctgcaaagaagataaatctgcttggtgctgccaacaacaacaacaaaagtaaaaaaaagaacagaagagaaagatcgtgtcgtaaactccaaagtttagaaaggaattactgctggattcacccataccatttgcttccattattagtttggtgtacaggcaatctactacctacatttcaaaacttgcattttctcatttgtaagtgcgtcaggcacagtaattttgagaaataacaggtagtaggcaaattcttgagaaacccttgaatctggcttccattttgttccttatttttcttggtaatcagaaggatgcagattaacaaaagacagacgggtgacccagacatgcaaaactacagagaaacagatttgggtgaaagggatcatggatcttagggccaaaagggtcaaagaaatggacaactccaagagtctgccttcatagcaatgtggtatccattcattcatccaggagttgttggtctcatgcaaagcatccaggttatagcaacgaagatgcagcttctgttcttaggcagcacggagtccagtgggagacacaggccagtaaataagcaatttgttgcagcatgataaatatgtgatgggatatgcaaggttttatgggcttggagcagagagctgaacataagcttcatgagggcaggagctttgtctcttttattcactgctaggattcccaggctctagaatagtgcctgccggtgttttgaacaaatacgtgaacaaaccatgaatcctgctggtggaaggggcgggacatcctgcttggctgttctgtgaaggaatcagccgaggcctggcaaaaagcaatttgtagcttgtccacactggcagtggccttgagaagcctgcactggggtggtggaaacactaatgaaaaaagcatgtacaaaacgacatactgcaagtaggaatcataaacatagagtctcccagataattcagaatgcaaagataacacagttgctcttgggccctgccaagactcttgattttgaggtgagcctggagccctcacattctggatcaacctccccttgtgtgaagagctgtgacagaggcccccaaacattgcatggtgtggctcccgggcagggcatagctgggcctactggagctggaaagactcaggggatggggagagacgctggtgagaatgagggaagaatctggttgtgactcaaacactgatttctccaggacccttccttgacactccactgtgtcccctcccccaatccagtcccactcaatcatggcccagcaatgacacagctactggcataatctggattttcagtgtccctctctccatgagggcagggactgtgtctgtcttgttcacttctgggtccccaggaactggcctggtactgggaacccagacgaacagaggaacacatgcctgcatcagtttgttcctggaaaaggcaagttccgaatcagattttgaaaatgcagaggcccacgtgggagatggacagagaagaaaaaagaagccacagtcaagcctaaatgctcctaggaaggtcgccagctcacctccacgctgctcagccaccgccggaccgacaggaacgactgcttgtctgtgagatcgtacatgacgatgacaccatctgcctttctgaagaactgctgggtgatgcaccggtacctgccacagaagggccacgggtcaggcatgcacggccttccctctggagcccagaacttcgggcagctcctcacctctcctgcccagccgtgtcccacagctgcagggccacctgagagttgtccacattcaacgtcttcacacggtaatcaatgcctgcagggtgaaatgggcctgtcagggctgccctgggccaggggcacctcacttccaaatcaggaaacaatgcttccaacatctgaaatcacatcaggcccaaggtgacaaccctccatgtgcagctcgtgggaggcaaaatggagaaaagaacagagcactggatggggaggcatgggacctcagctctggtcctgtctctgccacttattagctgtggaacattgatcaaatcacttaaccactctgaactgtgggctcttcactgtaatacaagccatacactctttctttccctccctccctccctccctctctccttccctccctctctccttccctctctctctctttccctccctctctccctctctccttccctccctctctccttccctctctctttccctccctccctcccttccttcacccttcctccctccctctcccccaactctctctttctttctctctttctttctctctctctctttctctcttcctctcttccttcctttctctctttctttctttctttccttctttcctaaaattctttcagaggccccctagtaaaattcaaatgtcctaggggtatggcctccatcaaccaatccaaaggtatgtggaggaggaggaagaagaaggagaggaggaggaataggaggaggagggtaggaactggcaggtagaggaaaggacagaacagaaggggtaagagaaaaaatcacaggcaactttcacccttgagatggattagagctcctaatcctaccactgggctgttcacaaccatctctccaggggtgtgaccctacctggggtcctcaaccccagagagagggggcaaggtcagtgaagtgcattctgcatcccacagcagccctcataggtcaggacctcaacacaggtgttttgatacaggtattccccactcctgcatcctgtaagaatgtttgcaaaggcataaagaggttcgaaagtacatccccccaccaccaccataagttccagatcttagaactttagggcatctcccgcaaccttcagaaaggcctctggagggctcaggaagacaaacagcaacagcagcttggacagatagagacagaagagaccaaacagataacaaagaggcagtaaatggaaacggtcatcccagccactgccgctgggcaaaggctagtgcattaagacccacgagtgaggagacgtgggaggaccatccacttccagagtgtcaggggcagcagggagtctagaggccctctgcttcacagatgagggccagagaggagtgcaatcgtctgcgctgagaaagtgatttctcccattaatagaatgctttctatttccagcatttctatgtgctccctcttcaccttcacagagtcccactgtgacatccatgtgagttatctgcacacacatgcacacatatgcatatgtactcatacatacacattcacacacacaccgagagatgaagcaggagtcacgagccgtcgtgccttgcccgagctggtcggaagcaaggtgagctgcaatcccagctctgaggctcactgctcctcctgtagccagactcagggcacaggacacaggcagctttgtttcacctagaaggcccagggctaagtgctcccagcaaaacagattacagtggctgggaggtgaatccaagggtgagttttcttcctggctagaagtggaggggctgtcccggtctgtgctctgggagacagaaggggctgcctgctttctggtaacaactcaggggaaaggcctccatggtcatacagcttcagggccagatccgaaaccagccagtgctgcccgaggacagaggcctctgcctgctggtaaggcttgcaggtagacgggcagggagtttgctggggcagctgggtcctggctgccctcagctcctggtgctttgctggaggacaggcagctgcctctggcagggagtgagatgggcaaaagagtgtgctggaaaaatgttctgtgctgtggtgagcttggtgagactccctgctggacacgcgacgtgtttctctctgcagcctcagacaggcaggccgaggaagcagataaacaggctcttgggggctgggtgtgaaggacacaaggaaaagacaaggggggggggggatgaagaggtggcatgtgcaaacatgaagccagagaacacaagtccaacgggatagacaacacggaataactggggaccagagggcctggatgaaactgattttaagactaccaccagttctgaaatcccaggagtcaggagacccgtgttgtgcgttcctgtctcagctctgccactgaccagcaacgtgaccttgatggcattgctgcagctcattttggggggttctctctcctcatcggtagacggcagtgagatggaggtatgacgggatgaaggggctaagttggatgctgacaatctttaagtgcagctggagcattcgaccctcacatcgaggtgacccttgattgcaaatgaattgcttcccgaaggatggctcaagtcaggagcctcctggcaccttgaaaggtgctgtggagatggtgtgggttagcgctgggctgacggttgccaggagggtgaccttaacctttctcgaggtgacagccctgagctgtcataaggcaggagtgatggggagcaggggcagcaagttgctctggagaaataccctagggggctgctgcagggatttctctgtacagatgtgcagtgggacagaacctggaccggtggccaagaaagggcaggggcattcttccagaaacagcttctggaagaaacaccttggattctggcctgtgatttaacacagggaggttgtgaaccaaagtggagaagtgggaagaatgctggactcggagtcctgggttccagggagatcctctattgtggatctcaattttctcacttaaacatgagaggatgtaattagaccattcccaaggttccttccaaacctcgcattctgctaaaaccatccgtgctgcctccaggatgcccgcagggctcaagcacctgctcttgaaggagcaggctgggccctaggtggggcaggcaggacgccccagtcaccagttgcactggagcaactggcatttcacacaagccactggtgcagtacaaaacatgctcttatgagggagtgggagaccaggaagttggaggacccctcggaggatggaggtgagctggaagaacaaccaaagccctgccactgtgctgtagccgctgcccttgacaggagatgggctggagccctgttctggggttggatagctttggcccgagaggctgtgactctgtggctgttatatctctttaaagggggcagcctgcaggtggctggtgtgacatctgcttcctgacatgtgtcccagagcagggcctgcagtgtggcagggaaactaatttgagctgctgctcgagcatgtgtggagtggtgtgatgaagggcatcctgatttggaacttttgatattttttccccttcctaaattggagggtgtttccataattggcctcctgggaagtgcaaatgagtctgattttctatttttcagagcctaccatctcagggccacaagtcgaaaatgtaaacggatcctgattttgttgtcaggagaggcaggccacatgcacactgctcagggcacatggctctgaggcctgcaggctgggcaccctctccctgcctcccccagacctgtgccagagccgagactgtagggcctcccccatggaatgccctccgggagggcaagtcgacctcccaggcgctgtctcctgtgttaccacgctcagcacactcccagctgcccctccctcaaggccagacaaggccaggctcttctgagcttggtttgcaggctctgcacttcttcccatctgggtcccaatttttgtcttgggatgctctcagtctctgggtgaagttgagcagaaggaaaggcatgggaagatattccaggtgtgataacagtgtaagaaaaggcccagcagtaaggatgggacacctgaagcacctaggcagggacccctctctgggagaaatgttagaagggccagtttagggtaggagaaagaaaatggagtctccccaggcaggactctggaccactcaaagttggtcttgtagaaccagcttgtcacacagccaaaggttgaagatggttgagtcagagacccaggcttggaggcagtcttagggtgctgacgtagtttggatttgtatccccacccagacctcatgctcaattataatccccagtgttggaggtggggcctggagggaggtgactggatcatgggggtggatccttcatgaatggtttagcaccttccctttggtgctgtcctcatgaaggagttctcacgagatctggttgtttagaagtttgtagtacctcccctgtcctctcttcctcctgctctggccatgtaagatgtgcctgctttccctttaccttccgccataactgtaagtttcccaaggcctccccagccatgcttcctgtacagcctgcagaaccatgagccaattaaacctcttttctttataaattacccagtctcaggtatttctttatagcagtgcaagaatagactaatacaggtacccagttacaacctctcatttttcaaatgagagaaaactgaagccctaagaggcaccacatcctcttgaggtcacacagcttgtcagtggcggggcccagatgaggactcaggacttctgatgtctcactgaacctccacagcccctcctgtctgcaccaacctctgcccacctccagaggcagaaaagcatcttcacctctcatggggtgctaagtgcatacaactcaatttagggacactatggcatggaagagaaggtagttgaggggaaggtatcagcaccaaccaactgaagggaatgtgaacaagcctctaacctctctggacctcagtttcctgatctgtcgactgtgctgaacagtacctgtcccccagggttgtcgtggacatagatggaaaggatgactataaaagcttctggtaaatattcaggtcatacaaatacattttcaagtacagttgacttatcagctcagtgaaataggcatgcaatgtatttgttttttgttgagtgattcacccttctgttgagtgattcaagctgaaaggtccatatgcccttgggtctcaccacatattccaatgcaaccctcaactgtgggtgaagggattaaaggcctctatttaaataaaatatcacccagagtgggaatacattaagccatgatcatccattaatagctgagcctaatgagcttccacatttaagtccagctgtcgcccagcaggctggggacttaggacagatacaatgcgatgggtaaaagaagccatccaggagcaaggccaggatgtagcaggccctcaggaagacagggggaggtgtggcaggatgtgggtctcgggaggagtcctggtcagttcagggggagcaggaagacccaggaccctgctgacagtggggaggagtggtcaaaaggagggggtactcattgaagaggggaaggggacccaaatctacctttaccaaatttagttccataaacccaaggttggacttacaaagtactcaggggtcccatcacacacaggatgagcttagcagctagcagcgtgaggggaggtggcttcatcttgcccctcccagcctgtctgttgaacagagcagacaccagtatccctactggccaatccccatggcccttcccatgggcttctaacgctccctgccccgggcccccttctcacaaactcccttcccaaagatgggcctaggacccacctcagggatgagaactcacccacagtggccgccatgcctggggagaaccggtcctcacagaatctcctcaggaaggatgtcttccccaccgcggaattgcccacgaacacaatcttgaagagccggtcaggggcagagggagagctttcctcctgtggatggcacacaatctgaccaactgcagggaatagtcttgccagcccctgcccctgccaccagaggccctttacccatccctacagtggccctcaggaggtgcagaccggcctctagacctgcaccaggaggctgccacagcctcagaatgcagtgagcatagtcggtcttggggcatggaggctttttccagcatccgcaggaggaaggagaaacagccacccaagcgacatttgctgtctgcctcctgtggcagggaggcagaggccaaccctggattccagtggggtggaggaggcagcacgctcacggataaggacaactcggtgctccaagtgtgacggggcacagaggaggggatctgagcggtggcttcaagagggggcaggaattctttctgtggggaaggacaaggtggggcgtttgcacggagaaggagagaaggacgaaagaaggcttatccacatcacagggacagagacgtcccaggttgggacagggagctccttatttctgccctatcctcggaagcctggactaaatggaggatgcttttgcctccctctccgtccatcttatcggttcccatcgaggcactgccatcttccttgggtaactgaggcacgagggtctccacttaggaagctgggaaatgctaggctgctgggcaaagcttcccagagtcagccagtcactgctgccctgtctcttgggcccagcagagggaaacggctgggacaggaaagcccagaggggagtgaacttgctctaggacaaaaagcaagcaggaggtagagtaaggagccaccttccagcacagcgtccttctgaggaatgatcattcattccaggagctgccgctcaaacgcaggcatcttgccttcaggcccagctcagcgttgcctggtcacatggggaggctcttttgaatctatttaaaagtgaatttgggggaattagctcctctcattgagcaaatactataatgtagtggcaggtgtattagcagtacttgagtttcagataaaaagccattaactgccttttggagagaaatcaattccatgcagtatttaggagagaattcaaggtcatctacaaaaatttaaactaaaagttaaaaaaaaaataacaaccaacctgcactcaaaaactatgcctcctgccccattttctttattcatgcaatgcacaagggcaccaactctctgctggtccctgtacttttaattgttatttatttgagactaaaactcaatgtatcaatctaatacacccaagcacagtacaggatagggaaggtaaaacccaggatggcaggcaatggtcctggtggtagaggtgttgcctgatccttagccctgtgaccactgcccctccccaggcagagcactttgattttgcaggcaaaagcccatagacacagcaatggctcagtgtcaggcaggactcacctcacaggggcagcaaactctcaggtatgttcatgcacttaacccactgtcccctctgggggacaggccacctgccacaggacaataagatggctggattgcggggagggggctggagaaggagtacctggctggcaaatcagaagatctcttctcaccctccctcccttcatgctttttaatttaaaaaataaggctttaagaaataaaatgtatgctaatttttaaaattaggaaatacacaaaagtagagaggaaattaattcttcatagtctaccctaccatcctgaaatggtcactattcatatctttttatttttattttttaagagacagggtcacattctgttgcccaggctggagtgcagtggtgtaatcatagctcactgcagccttgaactcctgggctcagaactcctcctgcctcagcccctggagtagctatgactacaggtatgcatcaacacgcctggctaattttcttattttttgtaaagactgggtcttcccatgttgcttaggctggtcttgaactcctggcctcaagctatcctctcaacatggcctcccaaagtgctggaattaccaccatggcctcccaaagtgctgggattaccaccatggcctcccaaagtgctgggattaccaccattttaccaattcatatcttgatgcattccttccaacttttctttatatcatctttgttttatttacagaaatttgagatatataaaattttatcctactttatcatatattattaacttacaaatttttttagtcattaaagagttttgaaaatacttttaacagccgtataatattctagtgaattaatatactatgccttatgtccctattattggacattttttttaaaattgtttgctattataaataactcttgcattcttgagttaaatctttgtctgattttggttatttccttatgaagaattcccagcaatagaagtgctggttcaaaggatatggtatttttaagtttttgattcatattaccaaatgggtttccagaagggttgtaccaatttacacctcaccagccttgtatggcacggcctgccttgcagtagccttcaaacgagcgtaccttctcttgctggagctgttatgtggctgctagtgaatcatacttcttccctgctgcagttcctgttcccagcaaaacggcagcaggacctcgtggagtgggcacagaagtgagagagctcagtgaggagggctggactccccatcactgtggggctggcctctctcccctctgagctctgactttcccatctgtcaatggggagaataaatttctgatctgactcatcagatagcggtgaggataaaatgccatagcagatgtctgagcagacgcttaagcctttttcttcaaccccagctcctactgacctcttctttcacattttacggggacatcttggagttatataagaccctatttgtacccactgccagcaagtgtaggtctgtgcattgaaggggatgtggaagggcatgcaggagggagggggaccccacattggtgccacccagctctccactctcccctgcaccagggcccttgaggagtgatctgcaggcatgagtcttaatcctggcctgagaatggtaacctatgccgggaagtccattaggtagctcacaccctactgcagccactgggaaaagttcaaggcggcaaaggctcagttctcaatggctgccgcggcgtgcagggcggagcctctttcacactgccgtggatcgttctaaactgtttcagaaggcggagtgcaggatgagggctcgaggggcctattccgaggcctgggtcccaaacgaggcaaagagcatctatcaccatgagccagaggagccgcttttcatatggtctcccttttcctacagaatttagcaggaagacctggtgggcagtacagggtcacactgaagggaggagcaggcagggaatgtcgggatgaaagtgtgattcgctgattaagaaccaagagaaaaatgatggtatgcaaactttctaaagcagaacctgcctctgctaagagcagttacaaagcctgcaactttaaaagtgtaggaaattgtatgcgaggagcttggcatacagtctagcttaagtaggtgcccagttaatgcttttgaatctgaatcggaagagagagcacagggtcgggaagggggcaaacaacggtgggatgtgatgaggtttctcttcaaataatctgatcaatcttttcttctttaattcaattttctcaatccccaattttctcctttttttccttcttgcctttgttaaatgcccaggcacgccacagtaccaagcgttatcagtaccagctcacatttctttccttatttggaaaggggactcactttctggctcattacacacaccccttcccctttccctccactttcttttacgtgcccaccctatctaaaaaaaaaaatcaaatgtttagccagccaggattagtttagattgtatgacccgaccccggccaatggggaaggacttgcgtcagaaataaaggctctcgtgcccctttgttgaggtgtgctctcatggtaactggccaagaaggcacccctctgcgaagaagtagaactgctttgctaagaatcctttgttcaaatgttcagtttccttaggattttgagcgttattacaaacacaacagaggtctaaggagaatttatcaggacccctgagtctccccgcatgacactcagctaagcaggggaaagtggtatttggaggacacatatgtggtgaatcataagacctgcagcatctgacctcctgagctgcctctccgggcgcttggcctcaaatgcaagagacagatcatagaagtgatgtgcatgaaccaaggtaggctgtgcccttaccttacacagggcttcttttccaacaggctgccctcggggggatgtgggggtgagtttcaagggtggggcctccgggatttgtccctgtaccccctggtcagagacctcttcctcttctgagcatttgctcaggggttgctcaaagccaccatccaggagctggggcagggggtcttcttcaacggagatgattctgcggagcggccgggggtacggacccccaggccctggctccccggttcctggctcctcttctgttaggggatatccactcaggcccagggagcttctccttgggatgccaaacacctcctcctcctcctctgactggctactggggcggggaagagagaagagttgggaggatttcacaaaatatttcaatacgggctgcataacagcttttgtgacgaacagatacccaaggagcatcacacctttggacaagagcagtccgggagagggaaaaacaaaccagccagcattctgcagctcattcattcaacacgcttccactaagtgcctgctgccactgctgtggcagatgatgacaaagatgatgatgatgatgaccaagtattaagtaaagatgccatttacagatggacataatccctgtcctcacagaatacttgatttagtgggggactaaagcaataatgacacaaataaatacatcctttacaaattgtgagactgctgtgaaggagaaggaaaggttgtgaagaaacgtgtctcagactcagattttaataaagcgcccccgattaacattagcagatgaccttggctctgcccccagcgccagcccttactcactgtgtgtccttaggtaggacactccaactcttcagaccttgctgtaaaacgtggcccatctgctctattcccaaataagtcaatgcataaaaacagacatgtttgcaaaacatcctcagcagtgtgaggggtgctgttgctttgggagggccccccacctccagacatagcaggtctgctggctcacaggcagcttccccctagacaagaggctttgggtcagaagaaagccaggcagagcatctccatccacctctccttcctctccctttctcttcccctttctgtatccctagaagtcacaatcaggagtaagtggctcagaggcctaaatatcttctagaagcatttgagcactaagggcaaggagaagctgtaggcagtgcagggaatcggggaactggatgtgggggtcaatgcagggtctgtattttcagtaggttttgagagcaaaggcctcacagaaattgtcttaaaggaagtttgacagggaggaccttaagtccagaattgaaacacacacacacacacacacgcatgcaagcatgcacacagactagaaaagaaaatggaatggggatgaagcagtggggtgatagagccaaaggagaaaggaactaaatgaaggacacagaatatgcagaacagagaaatacactttcttttgctccctaatttaaaatatgtattactcttaaagatcaacagtagaaaggaaaaagaaaaaaaaatgcaggtatcaccatcctgaaattaactgcgattctgcaagataaattacgatatagtgcttgcttgaagaaagggtgaattagtttggattccttgatatgaaaaataaaggatttgcagcaattaaagcacctttcctttgacttataaaaacagttttaaaaaagccaaatgtcttctttccagcaaacttcctatatattgcatcaagcttattaagtgcttatttgtttaagaacacaattggtattcccatctacttttactctgcttacacacacacaagtgactatttgtatgtacacatgagcaactacgcatacacacacacagagcatgttttttcaaaggctttgcaaccagaaaagaaatagtcacttaaacaggcattaaaacaaagcatttcttggaaaaagctttctgtctgggaaattctcaagcactactgccattctgtaatacctgcatcacggcatgactgagttcatttttggttttaccaccaagtgctctctgccatccgtagggacagcagctacttttgtcaaagtctgcattagaattcagggctcacaatttgttgcttacttgattattgtctgcttcttccactcaaccagaaattcaatgacacagaggtaggtccatttggctcactactgtatatccagcaaagagcacaggacctcacacatagtagacactcaataaatatttattaagtgagcatttaataatggagattaatggtaggacctcatgtctaatttatttttggaggctttacagaactcaaaagaatgtctggtacacagtaggtaatcagtaaacgtctgctgaatcaatcaatcaatccattccattctgaggaaccaacaggccaaccactattgcagagatttggctcccaaattgtatctcattattcagctatttagaacaagaattcatgatgatcaggcccaaaggttttactgatgagctgatttacatctccagagtcacttccgctttgcatatctttttcatttcatgcttgcagtcttcaaggtctctctgggtctgatactgaagagtcgggatgcctctatctctctgtggccatctatgtggacacagcacatgccaaaatgaagagtgggcaggggactggtttgtctctcaatgagcaatgagccaacccttgggtactcaagctcaatcatgtgctgcccaagagcaacaaaatgtgttatgtttgagttaattaaatataggtcatggaaacgatctgtcaagcacaagccctagccttgtctgtaaaaggagttaactattggagattctatttgacagtttaattaaccttcatagccaatatagtcatgttcctaaaaaaccaagtgcattggccgggcacggtggctcacacctgtaatcctagcactttgggaggccgaggcgggcagatcacgagggcaggagttcaagaccagcctggccaacatggagaaatcccatctttactaaaaatacaaaaattagatgggcgtggtggcgcacctctgtaatcccagctacttgggaggctgaggcaggagaatcgcttgaacctgggaggcaaaggttgcagtgagccgagattgcaccactgcactccagcctgggcaacaaagcaagactctgtctcaaaaaacaacaacaacaaaaaccccgaaaccaagtgcatccattctgctcagcagacagcagtgtagtgctacccagctacacactccctccctctcccttgacccctctcctctgctgctctgcagtccctctctgcaaacacacagtagggtggggcagcctcagaagacaatggtctgtcctgtggggtttgctctgcacattccccctctggcttagatgtcagaacagggaggggcatgtgttccaagatttgaggggagtgagtgcagctgacctcagtttccgcacctctcaaggggtcagcaggcactgagtatgggcccagagccagctcccaatgagcctgagaggaatgaagggatgagcaagtggagatgacttacctcctaagaatccctctgctgtccacatatttgcctatcacagagccagatctctttttccaacttgccctggaagcagctgtgtttgccttggctgccttatttttctgtagaaacacaaaatgtcctcagatccatgcctatttgctccgatgtttgaacagaaaagggctcatggttcccacctcatagactaggctctacacaaaactctgaaaggagtaggcagtgttctggtctccctgttagcgtctagccactcttcccttttgccatcatcccctaccagaatccctccatctcctttccagtcagctaatcaaatgaacaagtgcacagtttacagcctggggcccatcatgctattcacaggagcactgatgatttgtaaaaggaaaagaagagataagtgtttaatgcatattttctatacatatttctaatgcatctagaaaatatacattaaacacttatctcttctgaaaaaatatatctatatttttgaaacagggtcttgctctgtcttccaggtcagagtgcaatggcatgatcacagcgcactgcagcctcaaactcctgcactcaagcaatcctctagcctcagcctcctgggtagctaggattataggcgccctaccatgcctggctaattttctcattttttgtggagatggactcttgctatgttgtccaggctggtcttgaattcttggccttaagtgatcctcctgtctcactctcccaaagtattgggattacaggagtgagccaccacgcctggtcagatagaaaaaagaaaaaatatttacaggcataaaaaactctgtgaatctttaattcacactcttctgtctggctccaatccctttttatttctaaagcctcagatgtaatgagaaagtaactagccaggaggatcaattaactcagtgttctgtcctgagctagcataaggtagttcagctctttggtggaagtaggctgggtgtagataaactactaacatctgtaacacaggacctgggtggagcaggggtttacaaccccctttgcctatgctccctgacagatgtcttccaggagatgaggcgggggagttagactgcaggaaatctctctcgttaattagccatcccatgattcccagtgatccttaatgagaggaggggctgcaatgctcccagagcccctgaaggtatggctatgctgattctaaatcaatcttcaattcttattgaatttatccctttctttgattccccacagaagttcttaattccatacccctttcaaagcagaatgagtttggcaggtaaagggaagggaggtgaagggattcgggtgacatttggttggaagttttaaaataaattcagtgttacttctaaaacaattataaccattatcatcatcaaacaaacatgtgtaggctcaagtcttgctctaatagtacacacaggtgggtggcagagatgtttgctgccagtcagcaatggaaaagaaactgtggcgtaatgcagtccctcagggatttgcaattataaagcaggtcagatctaatttagggcaaaccaattgccttctgctgaccatatctaggtcaccgttcagctaagggtgcaatccacatcatcccctttccaagaatctttctcaaagattcctgttgtatggaggggggatgggaattcactttcctcgcgtgacagcggaggtcatggtccaaggcagtaaatgacttgcccagggacccacatgaaattcataggatggtaaccctgataattaggaagtcacatcaatcaatttggccttcatttttcttcccttcaaagcacccagtggctcctgtctaaagggaaagatgagtaagaacatggaatcctaggttttggccaatgtggtccacagtgaagaccttcaaataaatataggatttcatgtcgtttaggaaagtgtgtgtgtgtatatatatatatgtacatacatatacacacacatatacacatacatacatatatatgcacacagactatatatatatagtttatatatatatttatataatatatattatatatatatttatattatatataaatatatataatatatattatatatttatattatatatattatatatatttatattaatatataatatatattatatatatttatattatatatatatatataaactgcagaatgcactttggggttcacagctgggaatttcatccgttaatactagaggtggagagggcagtccagatgacctcaaagtgcttagcagttttgtgattctacgactcatatatatatatatatatgcacacactacatatatatagagagagagacatggtactcaggtatggaagagtaggggtccctataggatagagaaaaattgttcataaaatcaagtatgaaaacagtgaaatacacatttctaatgtggtctatgacagtataaaatgcaaaattttcatcgagataaaaatttaaatgaagaagaacggtgtgagcattttggtttagaagtgataatgacatttcaactgcgccatctcatggatagaactatcatttctgcatccaagaaatgtgcgaccctcccaaatatttcagtcttgttgtgccaagaggaaactgcattactctgtggaaaattaacacgttgttacccagtaggccaccctgaatttttattatttgcaaaacgttttcatgccgtcatcctgccaaatagatcccgagtgtcaggacattgctgggccagtctcgacatggatctggctgtccagtggaccacagcccttggtcccccacaggtaagggagaactggccaattacctgaaaacatatgtcccgttcatcccgaaggtgcttgttcctttccctgtggatggtaaaggggaatctattcaaacatggagtttgcagttgacagatccaacggcagccaatttgctattcagatgggtgcaggggaaggtgtggtatggaagacaggggagtctgtggaatctccttccatagggatgtgattaatggtagaggatagtttttgtgtacagataggtacacacagatgtgggggatagactgaatgcccttgagacacccgtggcccatcaggattatgcatggcctctcttattattaggggcactgcctacagaggggacctcagcattccagctccacctgggagcttcctgttgggctccctctttctttctctctgtgcaccattcattcattcattcactcatgcatgcatgcacgcattcactcaaatgtctcctgagcacccactgcatgtcaggcactcttctagccatcaaggtcacaccaatgaccaaaacaaaaagttcctgcctcacagaacttgtattttagtggaggtataactgttattgagaaaataaagcaggaaagtggagtaaaagaagccagagtgtggagtagtatttcaactacagtggtcagtgacgccctcactaataagacagcatttgcatagagccttgaaggagcgggagaagcattccaggcagaggagaggctagggcaaagccttgtgctgggatacacctagtgtgagcaagaaataggaggaagtagagtgcccaaagggagagtagttaggagatgaagcgagagaaaaagtggatggtggtcaggacctgtctcttcacagccctgtgggacactgtacgaactttgatttttactccaaatgagatatgaagccaaggggctgggggtggtgggggtgaagcagatggcaaagaagtgtcaagatctggcttcagttttcaaaggatccctctggatgggtgctaagaacagattgctgggggcaagcgtggggtcctgacacttgacgaatatttttagcaacatggaggtcattggcaacctgggtaagaaccgtttttttggaacagcacggggaaaaggcctgattggtgggttgagaatgtgaagaaaaggagtggagacagtgaatgtgaacaactcttctgaaagttttgttgtaaaggggttgaagaaatggcaaagcaagtagctgggtggggaagtgaggacaagagttgttagacaagaaacattagagtacatttgtaggtatcttcaaaagagataaaactgacaatggaggagagaaagaacaaatgctggactagtccttgaggagccaggaagggacaggctctaattctagagtgtgagttgggcacgggggtagggggtggcctctgtgacgagtatggggagtacatccaccgtaacagagaagaaggcagagacatgggcatgggaggaagctcttattgcatggttccagctgtgaaacaggagcaagcgtgaggatggaaaaggaggagtcttttttccaggacttaaagtaggagcagttgggaaagtgagttgactgggtcgcagcgcgactgcagaatgcacttggggatcacagtggagaatttcatccgttaacacaagaggtggagagggcaggccagatgacctcaacgtgcttagcagttttgtgattctatgactcttctggccagtggcctctgaacaaacccacacttttgaagggcaagggagggcacagccatggttaggccctgatcatcataatgcagccatttatggagcacttattgtgggccaggcgctccgctaagtgtgttgtaaactatagaaagagattttaggtggggcctgaggtgtcaccacctgggcaactgacttccaattccaccagtcttgcagaaaacattaggaatgtgccagggttgttttcagttacctgcatgaggtgagcaggcaggcacacagccagggccttcagaataagtcaggagggacatggaggttatttcacaagtcctgagaatggcaaagtgagctgctcatgccagagggatcctcgctccgcgcggagctgtgagttagcacccttgcacatgagcaaggaccttgggagacctggaaagtcccaccgttttttggaaagcaggctgcattgtttcctgctttgtggcttcctgctttatggggatgtagccatccccatacagaagcctcagtatttaaagaaacatatctgcttttgtttgcatcgctgctctactgtgattcctactcacatgtatcatctaattctcaaaagaagcctgtcagctaggcatgggaaaattaagactcgggttggttaagtcaactgcccaaggtcacacaagctaatgagaggaagtgctgggttttgaatcagatccagcttcaaagtgcatgttcctaatcaagtgccctgaaattgcttgcgtttgtacccaatgtccttcggatggcagcccttctcaccccgtcacaccccagctgttgtcctgattccaccaccgtcccacccctaccctcccctgacattcccgctgtcccccacccccacctcagcattatctctcccttgattcctggtggtttcactgtgaaggggagatctgccataaggccttccctccacctctcagctttcattagccattggggcttaagcttggtaaccctggatcgatggcacagaaaggcctcaggccttttgtgattctgcacaaatgctagcctccattaaaaagacccataagtatttgtagagagctgccttgtcattctcccctgctcattctctttgaatctaccctttcatttttttctaaatgcaatagaaaaaaaagaccccaaacttgtccttatacgttttgttctcttccttttactaaagtcttcctaagaatcaagaccttcgcgcaaatggattatagcctggtcacctaagaacccctttacatgttccctggctctggaggctgaatcatgtactgagcacaatcaatctgaaacgcattcaggttaaagcacttttccatttggtagcatcatagatgccagacacagtgagcttcccttgctttcacaaaaacaaaaaccttcataacataactaggaagtgattcaaaaccacttgcacttcaaaaatcagaacccaaagtccttctgtttcctcaccattccccaagaggtgctcagcaggcagtgacttagaaacttcatgggcaacatcaaaaattccatctttccccacacgggtttgtctttctgaggaggggagggtggtgcacattccagaccagtaaactttgagtttattgctgggggtctttgaaggctgagaaagctttttcttggtgctctgtttgtgattcatttactcattcaacaaacatgaacagaacacagccgagttacggatttccattctggccccatcagagagtagctgtgtcgcctgtggtaaattacttctttcctctaatatcaacttcccatcagtaaattcctgtgaatgaactgccctactcacctaacagttttgctgacaatgaacgagataatatttctagcatagattaaatgctcattaaacccagctctgctcgcatgagatcaagtaccaagcacagtcctgtgagggactcagaggagtggggcagagcctccccaccaggaggaataaactggatgtgggcgcatgtgtaaacggaccaaacataatagagtggctacttggtggtccaaacactgcactggggaccaagggaattgagggcactctctcagcaggcacgtttttccagcacgtaggcaaggatgaccctcagactggtccttccgaccccaggcttctgggaggtgctctcagcacaggccagtgcccaccgacgcaccttaggaaatccagctgcttgaggagcccggccttctcacgctgtagactctccgtcacacggtacacttccctgaggaggaggcaaacacatggcagtgagctcccaggtggaagccggatgcccggacccctcatgctggagaccagcaggtgatgccgtgctggggatggagggcattggaggaacgtggcctcctcctggagagctcctacagtatgcaagtgctttgggcatcacacatggccaatttgggaggtgaacttatcctcatttcacagactctgaccatcaaagaagtctgctaagtctttccagttcacacagacaatccgcgactgaaccagggtcccctcctaaccccagacccagctcattccacagccacttcacatgccacctgtgaataggctggatggtcactaaagagttggtccaggctcaaaaaccaaacaccacatgttctcactcataggtgggaattgaacaatgagaacacggacacaggaaggggaacatcacacaccagggactgttgtggggtgggggaaggggggagggatagcattaggagatatacctaatgctaaatgacgagttaatgggtgcagcacaccaacatggcacatgtatacatatgtaacaaacctgcacgttgtgcacatgtaccctaaaacttaaagtataacaataataagataaataaataaataaataaataaataaaaaagagtttgtccaggctccaaactgccctatcctatccagacttcagggaattcaaatcaatattcttctccagccagatcttgaagggtgagagcagaatttgtattaccttccctcccattctcaccccacccagaggctggttcagtatgtttttaggagctctggaagaatcaccttctctttcccaccctcctcccaaagtctccagatatctgggcttttcactattgggcactcatttctctgacttatgatccagctgtaatgcagagattgaatgtatctattataatcattgatatcactgtgcaaacgtgttaattataacaggagttgtgaggaaaggaagagagaggcagggaggctgtgaatcagggcaactagagggcaactcaggtggggaggtaagggctgtgtctggtttgtttacatcgataccctcaacacagtgcctggcatggaggtgtaatcagcaaatagttgtaggaagaaagaaaagagagagagtaaaagaggtgagggggagcaaagaaggaagaaagggagggaaggaggaagagaggaaggaaggaatgaaggaaggagaaaaaggaagaaaaaagaggaaggaaagatggggtaattggggaggtcttcagcatcactcagggaagaaaggaaagaaaaaaataagcacttaggtgataatgggaaactggcttaacttcacaattctgtcttcatttttccttctgtgttctataccatgctttagacattttttaatcaccctccgatcttactacaagggttcatagtttcacgtttccaaactgcagcacagcttttcatgtagggagcatctcgcaagttgatacaggcgtcactttccatgggctgtcagggctgccaggctgtgcacacactgggctgggcaaggaccccactgccaccccatcagtatcattactgagctggcaaaaactgcaccaacatgctggcccacaggactctcctgccaagctcctattaacctgattccttaagcacgatgtttctttttttccccactttatagaataattgcaaagttaatttacagcaataacaggctgaatgaaattctaagttcaactcagacaattccaattgagcaacaaactttctctggctcctgcagagatgcaaattcctgacattttattaccaattatatttaatttcaacttgaagtaaaacaatgtatttcccattatccaaactgggtctctaaacccctgtctgggactctgctgtgatgagtgctccgtgagcagagctgcccgctcccgactctgagccctgggagctgaagatcctggtgctgtgctttagggtccccccaccccaccctgtgtcctgcctctctccaggggtggccaggagctcacagctttttcctctgctcaggaaaatcattcaccagggacttaaggtctgggttctcacggagcgttttaccaaatagccagttcccaaattctaagtcttctctggctctgcatacacagcaccagtgaccactggagctacatatccatacatatgtattagaaatacatgtgaatacaggtactgttctatttgtctagtaaacatatatctgcttggatatttgtacatccatatatacacacatatattcagaaatatatttttgtgtcaacaaaagaaaggcacttctgaaaaaagaaagacacttagatatttgactaaatgacctctaaagtccttctaacctagaggttctaaaagtgtatacatgggtaatatgtaaactgaaagggaaagaacctgcgtttgtttggagtggtaattggtgaggcgtttatggttacccttagggaactgctattggctgttttaggggagggatgcgctatggagcacttcacaagccatactgtcaagtgaaaaatgcaatgctaatgcagaacagtatgcttagtatgctactgatttataaaggaaaagtgtgtgtgtatgcatgcgtgtgcacgtgtgtgcacgcacatatatgtgcctgtgcctgcatatacagagcatactctcaaaggatccacaagaaaccatggccagtggatctgatgactgcagatcggggctatgtgggggacacagacttctttttgaacgtataaccttttgtgccttttgaatttcctgccttgtcataattacttactcaaaataaaagttaattaaaaaacagagttgctgcttctcagctgaccttcatctttacattatctctctgcttgatagttctttctttatctcattttaaaatctacttctgctaccttgagcatcttcagagatcagcaaaattaattttgcctgttcagaattcttgctgatcagtgactaagcctgtttacctcccagctccaccctttcctctcccagctgctctgcagtagcacggggcagcaagaccctgtcagagagcatgggactatcaggagaactgggctctgtccttgttatccggcactagctagctgcatggctttgggcaggtcactacacctctctgagcctcagaatcttcatgtatgaaatgaaggaagtgacccagagcatcaaagccctctccatctgccggtctgcaaccccactctatggagaacaagctaatcctcttgctgcactgctctcctggcctccctggacgggacatgctctccgggccccagcatgctcaccggctgcacaagaaactgcaagcttcttgaaaacaagtttgtgaaggttctggagtcatatttctctcttcctcccaaccctccctccctccctctttttcaattcccagcctccagagattgtgtctctggcttggttaattaagataagacttcagaaagctttgaatcctcatgctgtgatgtgatgctccagcactgggtgtttatttccatttgctgttctaatgcttgtgccttcagatgtttgttgcttttagagcttgattgaatttcaagagcctgcatccttaattctgtttgtaaagctaaatgcctgtaccttgttgacctgttctcaatgaggaggaactgattttgcttgttcacaatgaaatatgttgtccttccacaattggtcatccaagaattggaatggaggggcttattttaagtcagctacttgggagtttttttgtttttgctttttttttaactagggctatcttactagggtgaaattcccagctcaaacatgtctccttccttttaccccaggcaattagtgccaaatggtacaggattccgcacataagtcaaaccagcagagcagttttatttaggcctatggaccaaaatcctgccagcagtcagacagagtgagcaccttcacttttgaacaaggggagttaacatctataaaacaagttccggtaagtagcactgcccttttccctaaaatcagactttcagtactacctggtacctttcaggatcagacacacaactacttttttcagaataaatgaatgaatgaagagtgcataaacgaatgcgtgagtaaatgatagcaagtccaactcttgtaagaatattttctgcaggcttgttattctctagggaaaatcagcaagacgtgcctaactcttagcatcttgggagagttacttaaacctctgaacctcagtttcctcctcgataatagcagaacctgctataccaggataattttttttttttgagacggggagtctcactctgtcacccaagctggagtgcagtggcacgatcttggctcactgtaacctctgcctcccaggttcaagccattctcctgcctcagcctcccgagtagctgagattacaggcgtgcgccatcatgcctggctaatttttgtatttttagtagagatggggtttcaccgtgttggtcaggctggtcttgaactcctgaccttgtaatctgcccaccttggcctcccaaagtgctgggattacaggcgtgagccaccgcgcctggcccaggatgatttaaagatcaaacgagaggatgtcaaattatcgacataagtgagatatattgaatgcccagcacggtacctagcacaaaataaatgtttgccaaatgaataagtcattgactatatggatacatgaatatacaaataaacaaatgagagtcctctgccctgagcctcagagtacatttgttctaaaacctaatactcccaagacaagataaatgactgactcttcagggactcctccagcttaaggtgcagacccaggcttgattctgcctcaggtgtgcctctgcctagtaaactaacccccatggctggacgatattggcaggtcgggccctgagagatgtggggtttccccctactgggaccacacagttgaatctgaggaacatggtgaaaaaaatgggcagagatggagaggcgagtccagggcagtgacacatgctccatcagatcatatgctgatcctggaagcctccctgcttccctctggtccctcttggcctcccaggtctctacacgaccacagtcacttaggatctgtctgctcactcagcatttgcccacatactatataaaacaagttctggtaagtacttgttttatatagtcataaagtaacatatgagtacatatgagtaacctcatatttgtttgcggaataacatgtctttgtaatcacagaatgcattttctgagaacagggctgtacatttcttgtcaatcctaggcaatgctggacacagaactggtctgcttaatagtgtcagaatcctagaggagtgttagaagagtctcagggagcaacaagcccaaatcctcttttcacaggcaaggagacagggtctctgagcggcgaggggacatgcccatagtggggagtggtgcgggaagacagcagaggagtggacaaaggctggactcacatctccttctcttggtggagtttgcaggcctcttgctggaggctttccaactgctgctgagcatcctggagctcccaggaagtccgctccagctcccgggccagctcctggttagtgagtttcagcttggtattctcagccttggtctcatgcttgtcatgatgcagggctgtgcactgaccttccagctgcaaaggaatggggagcagaggggaatgaggagtgaccaccattttcaggagggcctgccctggcctcaccttgttttctctgcttggcaggcaggaaccgtcactgccacccctcactggcctcaagcctaaatcagcattgtcctctcctcagttcacacgtacacactcctctaggcaagaaggagctttcagacacatcttgtctctcccctgtctccacataggaccactaaatagtccaggaggagctgctccactcaaaaagaccactagcaaaggaacttccacaatccgtctgtgtgaatggccttgagatctaacctaaatccatcttgttgtcctttaagccaatttctttcccttggtccttgatggagaaggggaacagctaaatggcctgcttcataaaaccatccttcccaattttgcacgctgatagcaaatctatatattcccttttctcctctcaactccaattccattaatctagagaagcttttaagggtagccagaagccctgaaaattcttaggaaataactaaaacagttcaaacagaacatagaccttttctatgtccctaaagcaactaaaaaccctgcatttttatagcttcagcttttcttggctgttgattatgctttgcagagcttccaatcctctcaccagaggaagaatcaaaccaaggtacatatatcataataaatttagtttaatgaatatggccggcaaggggaggaagaagtaacaacaaggaatttggcgtgattctcaagaggctcctgtgtaatcaggcaagcatgcagtaattaaatcgagtggcaatcattcatttgagggataaatgtaattgctaggaacttaatgcataatagagaggaagagaaagagtaggagaagcaaggtacaactgtggatggggaaatggggaggcagctggcagttcccggagtagaaatcatcttgctgcagaaggaaagagacctaaattcatagcttgggtagcagcagcagtggaatagtctctagtcttagcagggctgtcttcaagtagattttgatgtgctgctaaaaatagccctctctattgaaacggaagcaatgtgtcttggtctgtccagagctggattccttccagcaccaggcacaacaaaacaggaggccagtggcaccctagcctgtctccctcaggagcccttgctaagcagtggaggccactaagtaggaggcttgcctaggtagtcagtctttctggggtcgttagccaggtactcccagccatagagacacagccatatagacactgccctgcagagggcaccacccagcctgcctcctggaggctcgggtacatcagagaggagtgtctggtgtctgcatccttcctgcagggatggaagcagccacaaaagatgccaatgaaccagtccaggcaccacacagccagggaagagacaggctgaccttggaagaacctgttccagcagaggtatccatggccatattctagagggaagaaacttatctgcagcctccccccagatatagtggtagacagtgtctcttgtacctcagcattcccctcttttcttatacaggaggcaggaaacaaattcaaattttggcattctcgtggctcctgggtataattataggaacatgtctgcagatacctcgtgggggaatgctcggcaacttttccaagtgaaacacctggtattggagaagtaaaggttttatgttgggatcacctgtgattttaaatgctatcttttgcgcgactaaatagttcttctcaggttaaaaactcaaaagtccttaagtgaatggcagggaaagtgggcaagaggcagagaaaaggagagagtgaagagccaggtactctggggccatggatggcaacatacccttttctgcttctgggtgagctgctccagctcctgctccttacataacagtttctgctccagctcttgactgcgggcttgaaacctctctgtgtcctgccaagccagaaagagggacacacaggacccaaatgtagcacacccgggttatagattttttttttcccaccttgaacctactcaacatcagggcccatcctattagaccatggggcttttcccacagcactgcagggctctggtaacctgcctgccccatcagggaggaccaaatgagacagagatagtgcaagcgcttagtgaggcaggatgcaaactcccagcaagcgtggccatgttcaatgactgtgcaccaccaccctcctctccgccaaaaaaggggcagtgtcagccagttgtggtacactgaatggggagaattggggctgagttcaaacatcaggccttggtctcctcatgtgcaaattgggggtgactgggggaggcagatgacccctcggacaccttccgacctggatattctgttccaggttgggcattggcatcggatcccttaaattggcctcactctggaaacacagggccatttcctcttcctcttgagggtctaagtgttcatatttgcccactgtgactgaagtctcccaagccctgctcctcaggatgttttaatatctgctccttccctaggctgggcttcccccacagagaggtgctgaagcaggtgagaaggggcctggctatgggacgaggaggaaagtgtgtgggctatcaggtgcctgatgctctcagcagagccagatctgtggtgtaaggcccctgagccgagcgggacacaacttgggttccagccctggcttcatccaaccaacttgcttcattcttttggatcactgtttgttcacagaatagaaacaaaaatacccatgccatctgcagcactccacttgcctgaaggcggaatggaggtacaaaatgtgcaggaagagaagaaaccattgtaactgccatataactcactaccggagccccctggggttcctgtcatatggaaggactctttcccaaggaggacagcgtgggatgctgcactagacgggtgtcctggcatgacagcagcagcagcgcggtgggggaacacggccccctcgggccagaggcctttggacacctccattcaaaggcgcaggatgcttccttgcgcatcctctatggatgttaccaggttcttctgcccatttctaggctggtaaatgggcagaagaaccactgggacagcctgtgattatcctcatgttaaccacatgaatggcagaggtacgatctgaccagacagcacctgctcccaacatttgcttccagagaatcagccccagggaatttgcctccttcagcttggctgctgctctctgtgaaaaatgctgggagcagcgagcggctccagaatccccatgatgatgtggctgtacccacaatgggcctacagagcatcctcacaatgcgccaggacagggcgttcagggggtgtagcatcacatcctggggttggaaggtgcaagtgattaggtacttccttcacggtcaaacaaactggtaagggtcaagccaggatccaaattccggtccgagggtccagccttttccatgatgtcagaaactgtagcaccactatccttgatctatctccaggcaaaagcctttgtatctaatggcttaatagtgctgcaaaaacatctgagcagtttccatgttcacccagaaggcataaatctaagcactgagctttaaaggcatttggtgtcaagaagggagaaggagggagcagaaggggagagggaggctgggtcacctacagtgatgcaaacttgtccttgaatttttttcctctgacctctgccctcgcccattccccatgccctggcccagcatttacttccaaaatcacgtcttttcctttagctaggacctctgacctatagtcatggcccaggcagaggggacaagatgccccatggagctcagcctctctgtgcaggatgtcattcgggataaagggggtggctgtccgatggcggggaggtggggtggggagctgctgttctcaggaactattttgggatctgctgatgagaagtgtgtgagttctgtctgccgtcaactaggttgaggggcaggagcagccagaatgctttcaggcgctacaagagggaggaggcctggaaatgctgacaagcctccagagggcgctaattggaggacacgaccagattttcttgaaaagcactccgattccctcagtttgaatgacatctgtgataataaatgcagcagtggtgtcgataatctgaggcagcataaaacttaaaattggctcaagagaaggggttgtgagaatagccgggcttagtgctgagcggcaagggaggctgccatctaagatcaaagccttttctgcagagaactcaccaagtagatagtccaaaaatgggtactagagagttctctgaagcttttttttttttaaattagttttatgaacatgtttccagaaggatcctgcttaccttggcaaagaagaggatttcgccaatcctgacctcttgagacaaatggcagggcttgggaaggggctgataagggtcagaccaggaagagggaagggagttaccacttcctccgtggtatctgtggaaggtgggatttgttttttcttggctattaaattttccatgtgtctaagggtaaaggataggtagcacaggctctaatgcttgtccacttaggggagctgctgggcacagggtgaactgggctggtgcatttgggtgcatttgccatataaatctaggaagtcaatgtcagatccaatttaacagggaaagcatgagcctccatcctttcattcattcactcattcacttgttcattcattcattcatttaacaaacacttgttgagcacctagtatgttccaggcattgtctatgtgctgaggataccttagttaataaaagataaaatctctgctcttttgcaacttatatgctagcaggaggagatagacactcaataaaaataaacaaggatattacatgtcctgtgtgaaggtgataaatgccttgaaaaaaaaatacagcagagaaagagggaatcaatagtgcatggatgggggcaccaaaatcttaaacctgggggagacagagcagatatgtcaagctggcctcagagccaagcctggggagcgtacacttaccttcaggagaaactgctccttctcacttttgatttgttgttccatctcctcatagagatgctggatttcttcatcataagcagcaattttcctacagaggtggcaaaaggagagtctcattgaggttcccctactccacagcggtagctcctggagctcagacaccagttccccaactctggagctgtgggtgtgggggtgacagcataggtcaggtcagccaacgctataagatcagtccctcatgatcagctaacccgacaagggatgcagaccacagaggccttgcgagacctgcccctgcaactgttaggtttcatgtggcctctcctccttctgtcccccagccatcactcctagatgatccctatgctcctcggtgaagcttccctggaccatctccctttattttactttatttcaacacaagcccacaggcctctgccagacgtatcatccctgttcccgctgatctccacgctcatagactatatgaagttgcattgtgtgggtttctttcctgttccgtttcctggtttatcttgtccctgtttgcatgctttctctctgcctgtccacatcaggaccctctgaccctgcactctcaggggactctccctgtatgcctgagtttgtgtgatccatgtttctcatgagattctcaagagattccatgatgatgacaacaagagctaccacaccccccaccacaaagcaaaagcgacaatgtctagtgcctgtgccatctcaggctccagggcacaggcagacagtgtgagacaggcgaggctggttggaggatggcgatgacaatgagatgtcctcatccccactctccttctcagcatccttttcccactctttcctctcccccgtcagaaagtaagtacctagagagatgaagacaaacacacagcctatagagagatgaagacaaacacacagccatggggacaagttttgtaggtcatccccacggatgacccttttctgcttcccccctctccccatgatacatccaacttcaatgcccctccaaattcaaacaggaaagatctggtagtagcattggaactgaaactgggagttaccacactgaattattaacattcccagatagttgcattttcataccttttttgctgaccatgcagtgaaagaccctctctgtggcccttactccctatcctctccccatcctgttaaggaaacttcaggctctgtgaacaggctaatgtggctatcaaggcctgttctgaacatgcaacacacacacacacacacacacacacacacacacacacacacacacacacacacacacaattttggcccctgccattctaacttaaatgatggcaagcccactgtgccctttatttaagggacttcaataattgaggaaacagccctggttctcagttttaagaggtactaggaagatttctgaactgaacataaaggatgggaatatatttattcccctgagccctccatcattttaacccctaactcccatgtccacttgggcctccaatccaggaccagaccttctctgctgtccaaggctttgccacagcccaatttctgtccctttctcacctgccacctgttgggagagcattttcaccatgtgcacaggtgaacaatgaacaggagtcattttgattggcatccttccagctttacagaaaccacaaatctgacccagacaaaggaacagtgtgtgagactccatggtcaggggcattgatcacagagcacagccttggagttcccttgcttggctgcaaccccaagaccagaaacttgattttgagtgactgtacagtaacggtccagggtgggctcagcaagagatgacagtcctcccagacctccacaagctgggaccccgtcttcatggatacgtcctgcatcccttactctttttggctaagagtaagaaatctcttcttgttaaatgaccaatgtttgggattgttacttttgctctgagctaactcataagaattaaaataaaatcttggagggaaagtaaggaaaaaggctcatgctattgaccctgatacttcagtgacagaagcagatacagtttgaaggaactttcagaaagcaagatgttttctcttggtccctggaatgaccttcctgtgtttgaagaaactcagatgctagatggtaaatgatatcaaggaaaactttagacagagattccagctatataaatacggtaaaactaataaagtaagatgagagaaacttaaacattgatttggctctgctaaagcaattcatataaagttattcatataaacggcttactatttatttctaataaccatgcggggcattaattctataatataattaaatgtgctatagtaactttgatctactttttatttgattaaattaacacactctaagtttttcatgctcacataccagcttgctggtatgtgaattaagttattttacaaaccactaaaaaataactggcaggaagatagatacagggtttgaagagtgcctcctcctagccctcactcacaaaggctaggcctaccacagagaagccctaggattccaggtgggcatcagagatcctgggcccaaccagactcatatatggaagcaagcttttggaaagttggtctgctgtgagactctccaggcttgaatgactatgagaagcctcggttagaacacactaatcccaggaatggggaagattaaggtgctgtgcataccagtcatgtcactaaaccagcgcagggacgagaagacttgcattctgatcccagaaccagctcctttcctcagtgtgaccttgggtaagtgctctgacctcctcacatcctgaggcggtacctgccctatgttcctccctacattgtcataaagaacaaatgagagtggatgtgaaaagcgtcagaaccacagagccctcagtaaatgtaagggattatttactcctgtcattttaatcatggactgtggaggacaaagggcagtgctccccagggggaagagagtcttggtttcaaggataaaaggcctgctgggtttggaaaggctgatgcaattgggaagatgaagaagaaataactcagtcaataaaagtgcctgtcagaccaatccattggagacccaggctgtgtgtgagcaggagctgcagagccaggagcctgtgtctgcaggagccccgcagtggctgcgcgggcagtggcagcaagagacactaaaaagatgtgcacatatggtgagtcacattcagcaaggctcgccatattctgccatcaggggaaagagacaactcatcatgtttgcttatcatatacatcctcgttgccacaatttctaaaaccacttctattgcctaatgcatataaatggactttgaagtcttctctgtgaagattttgccatctattccaaccctcatgaccccttctctgaactcagatgacagcatatgtcttcatttgatcatttaacaattaatcttaaatagtcctgaacaactgtttcatttgggttcatgttgtctcaattaggttataaacacgcaggcatttatgtcacccacagggcctgaactcaaaatgttaatgccaaaaacctgtaaaaactcaatttacaattttgggtaccgaactcagaagctcatggaccatttcgagggaatactagataccatgggagttaaagaacttcagatttggaaggtttgtctgatctaactacctgtttttccagtgttaaaattcttgcgacaataccacgtcaaggacttacccagactaggttagaatacccccagtgacagagaacttgctgtttctctaagcagttatttcatctttgggatattctggctcacagaaatctgtctttccatgaccttactcttcttctgcataaaagcctttcatgtatttcagaatggcatcaagacttcaaggagttgccttgggttccggtcaagcctctccacttcctccaactgtgtctcacatggattttttacaaatccctttacaattcccttcatgcttcttcagatgggccgtaatgatctttctcaagccacggcagtgccaaactgaatgcccagtgtatgagttggacttgtgcagattagagctgactattacctctcttgttctagatgctgcatatctattcatacagcctaaaacctcattaacttttcttggcagccacattacagttgacgtatgtggaacccattcgtcaactaaaatctctaaattttatgtctgtgtgatcatttttgttttaaagatagtactactgaatcatatctcctccactttgtgcttctgccattggcgttttgaacacacagcaacatctcaaatgtaatgctgttagattttgtgtttgctatttctagtccatctttccagcctgtcactatgctaataggtttcagttggtcatgcagtgtttcaatgaccttccaagtttcattgacattttaaatcttcaatcaggatgtaggctaaataatctataatgttggtttttataatttaatgcatctgagagttatttaaaagacagtttattaaaaggtacaaactattggtttctagttttattatattatagtaagaaatggttttggaatctattggttatctttcctctgtagccacaaacatgatcaatttttgtacaacttctatgagagggatatatattctatttgtaaggcacacaattctatattcgtctctaaagtgtattcattgatggcttcaaatactttatatccttcttgtacttttgcctgactaatgtgtcaaatctgaagcaaatttgttaaagtctaaagtctttttttttattaagttttctttattttttctaaaagcttctgccttatgtgtcttcctgttgtgttgtttggtgcacaaagcttaatacatgttgttcttctttatggatggaatttttttattacttcaaaacattccccgtttatcttcctatactcatgccattggaaaaatattagacaaaatgaggacgacaacctgtagcagagatctctgagatgttaattagtgacatgtaggcatagctattcaacctatcttctcttagccattctcaaaacactccttctggccgggcacagtggctcacgcttgtaatcccagcactttgagaggccaaggtgggcagatcacctgaggtcaggagttcaaaaccagcctgaccaacatggcgaaatcccctctctgctaaaaatacaaaaagtagccaggtgtggtggtacacgtctgtagccccagctactcaggaggctggagcaggagaatcacttgagcccagaaggcggaggttgcagtgcgccaagatcaggccactgcactccaacctgggtaacagagtgagactccgtctcaaaaacaaacaaacacttcttcacctggctcccagaactcaaatggtatctatttaattatttcattttctaccatctgaccctaatcattttgagttatgtaacgcagaagagacgaagaagaggtagatgaaagaagagtgagggcaagagacatgagttctcagtggaagagaaggacaaagatgtggaggaccagagttagcaacagtcatgagcactaatatttatcctccccgtccttttctttccccatgatagctgggtagttcttctggcatgtttcagggtagtctaggtcacagaccgtttgctgacacaggtatggttgcctcaaagttcattagatccagaaacagaaggtctgggttcaagtcttggttctgacatttacaaactttctggccttggataagtcacattacctcagtaagcctgaagtgtcctatatctgaaaaatcagttggtaatacctacttcagatagaagttgtgaagattaaaaaagataatgcatgtggaagtgtctagcacaataagatgcatttaacaaattctaattaaataagttttctgattctccagaggccaaggaccccattctgagagccactgctctatagctccttcagatgtcagccaagggtcaagtagaaactggggggtggaggatcaagtggcagcttgttgtatgtggtgtgaagaaatgtgtgcaggaatggtgaaggagttggggacagaagacacagggtggataaaacctgacgaggctcaatagagaagactaaatgtggagagagaagtccatacatcccaccaacattgaaaagtgttgatgaagcccttcttacagtatgactctgggcaaaatattttcgactgaagttatactctctgtgtaatttagcatctaagagtactgagcccagtgctatagtggcagggaggaaaggaactgatagaagaagccatgcactatgaggcagacccaaaagaaccctcctaggttctggctgatggtcatctgtgacctcagagccctgctagggggaagtaaaggaagctacctgctctggtggtggggaggaggggggagttatcaggggaaaagctaagaagaggtgagttcagaatagggagattctcaacagcagaggggagagagtaccagtgagatactgcggatgccataagggcaacagtggattggaaagaatgagtcctactgaaaacccagatgaaaacccaggtccagctcagggcattaaacatcttcacccaagatatctggttctggcaaatgtccctccctaaaggacggctgcgtgtgtgtgtgtgtgtgtgtgtgtgcgtgcgtgtgcgcgtgcgcgcgcacgcgcgcacacgctcatgtgtacatctggtgctgggttactggggagctaaggatgggaggcagatgggatatgaaacaaggatataggggtgaagaattcattattctaatgtaaatacaaagcgtagcttctgagaggcctttagagataatttgcagggaactacaaggtgagatgtagttagcgttaacttatcctgccagcctcccacaggaactgtgaaaattaattaaccttcacaaagtgttttgcacatggcaagttaaggtgctacgccggagcgaggcattaatactcaacatcactggagctccagctaacggcacataggccaaggccttcctgctgtggaatactgcttggtcaaaagatttttttcctgctttttctctcctttgtcctcccttttaaataaaatctgttgggatttcagagggtcttagaaagtcgtccattcccctgcctaggctgtaggcaggggtgtgctgaaatcattccaagaaaaatgtagcttctgccttttgtaaatgaaagcgtaggcttggccttggagagaggaaatggcatttctctacaatttaggtacatttcaggagcttgaactcaaggcagagtttcagaaatggcccctggccttggagagttgccattctgattgcatgtgtctttggggctgtggtttgatcaattatgtctcccggtttgcaaagttagatgcaaagagaaggagaatccctcctccccatcacagaatgaaagcttataaagctcatgtattccctatgcctttggttttcaagtgaagaaaatgagggtcaaaacagtgaagtaaccaaatttccaagggtcagagtagcaggcagaacccaggccttgacttgggtcccatggttccattcacatcactacgatgtctggcccagcagcctaggttgtaaaatagataactccatacatttgcatttagaattgtcagtcttccaaattacacctggaatctgtcaactggggagtgagcacgaactggagcaaggttatggggccaacagtccacactgccatggccaaagagaggcaagattatgggaggggcttgactcccattcccccatgttacccacattccctcccaccccctgcctcaacgtgctgatcacagaatgaagaccctcaactgcagaagtctcaagaagtctgctctttgcaagagaagaacatggaagcaaattcagcctcagccagttttgtgcttggaatgggaatggtaaacagggttttagactccccactgccctctgccaccttcttcaggcagctgcagtcctctgacagctaagaagctctcactagaaaaatcctgtttagagttttgttcccctgaaatcagtctctctcagtctctgtaattatctgcttatctctgtctctctccatctccatctctctcacacacacgtgggcgcatgcacgtgcacacacatacatgcatgattagagtagagctgaatgaaaggaaaacgtaagagtttgtagaaaattctgcaaaggctgtgaaattgccgattggattttcaagatggatggtttcttccaaattagattctgctgcctgtataaaccaactttgcagctttatcctattctataaagcaaaccattttttattagtcaggtttacaaatcatgcccatggtgtacacagagcacaaaccgtcctcacttttcaatttgctctcagggcaatgttaacaatatgctcaacataataatatacccacagaagacatgcattagattaagtcacaacctcgtcacctagagtcctcgccgagaacttcaccctaagaataggactagcattccagattggaagggcaccatgggatataccttttgctggctgactgattctggaagaactggctaaagcagcatttctcagagtgtggtctacagcctgcctgtatcagaaccgcctgggatgtgtgttatggtgcacgttcctgggccccttccctgagacgcaccgatttagactccctaggggagggggaactaccttttaatttaaaaatcctctggtaaatctaagcaacctaccattcaagaactatgcagctgaggccttccccaaggtcactaagaactctgtggaatgtaaggaccacctgccaggaatatgaggctttatttgctgccctatctggaggcagggccagtgacatgatgacatctcttccctgaaaagctttggggacagtttccttgtcctcgaggctccacaacacaggctgccgatccttaggcttgtgtgggtgtgcaggccatcatagctggggctgcctgtcagtctgtaaggtgcactccctcctggactggacaccttcccagagcacagggaatcaccatggaccggaagtggctcaatagcagctggtaggggctgcaacttaagggcctgtgagctcctaagaaagtgcctgaggtctgattcagatggaccagggaacactgtgcagataaggagctgattccaaagagggcatgaggactgctgctaagcttgtcaaggccgatgccaaacaggcaacaaccaatgatgccaaacaggcagccagctggtattcccaggctacagagctgcagaggattgagcaggagccctcccagagcacagcctagggctggcctttgatctagaaaacactttccttcagagctcaaagcaccccactcagaagctgcctaatttatccttgcccccatacattacaaatacagacgttaagcccccacctcagacaagtgaactggtgcccctggggtgggacctctggcatcccaaaatggttctggtgaaaagtctggatctactgctgcctccagacagcactgctctatgtgccctggagagctcaagcttttgttccagaaaaaggtaaatgcaggggatgctttccatggcaaagaaattcccaattctaagttctccccaatgtctacactatatccctcatgctaaagtgtgaagacctccgcacatctgcactgtgaatgctgaagggacttgctgagtggaagtctcacctcccttccttggagagaagtagaggcccacaaggggctcaaatccgaaatttcttcaacctctgtgcaaaaggacaagggtgtgggagactgaatgctcccagactcctttcctgctcctatttctgatatgcaggttaaaaaaaattcatggctgtgagtgaggactctgggttgtttctaacaatgctccaggacactctgaggggttctcctggccttagctattgagggcttgcctagcactcagccacctcagttgccacgtcctccctcccaggaagtggagtaaatgtgaggaggaagctggggtgggccttttccactcacagccaccgtgcgacctgggggatatggcccagcctgggaggctggggacagggagtgtgtgtcctgcctaacctgcataaggccagactcccccagaggtcagcctcattttctctggccctgtgggagaaaggtgtgtggtctgcacaaggagaaaaattagaggctatgctgcccatggcaacgctgtctaatgtttcatttgcaggaggattttctggtctgtcttgtgcagaatttccaggcatctaagcgctatctccttggtgtgatcatgaactcctcaaggagagggactctatgttccctttgcttaactcagagcctggcatggagggagtgctggttcgatgctagctactggttacacacagactgtgttccgcctggtgcctggcctggggcagacatgcagcagtcgtgacttgagctgtcatccccagcttctgggataggcattcattgaaatgtcatccactgtaatgaaaagtgagtgtgtggaggcgcctgggagatattctcacagctcaccagaacccgctcttcttgggattcctctaggctccctcccaaatcaggccatccccaagagattcctcccacttcctctctaaaacctgaaaatgtccctcccacaaacaacctcacacctccaaactcactttctagatgtctcagaatcactaacctcaccctgagtcatttgcaaagaatcccattttcatatcctataccctattgggatttccagtctcttgtttgatgtctgagttacaagtgcctttatacataggtccaccagcaaggtgtgacccacctttttttaaaaaatagaagagactaaaagaggctctagtagaaaacatccgatgttgccaataaggaaactgatgcccagagaggtaatgcaagttgcctgaggttacacagctggtaagtgccagtggctgggcaagagctccagtccttcctgcctcctatttcagtgccctgctcaaaacagtctgcagttctctggttctgcatccagagaatacctctggaatgggactggccaaagagttcagtgagtccccaatcccaacacagttccctagcagggagtgggccttgatcagctgaccccagagcaagcatggctggcagggatactgactgaggatgggcatggagaggctggaacctttggctgagctggttttgcacatgcagccaagagtggcttgacttttatctcaacaacgtttcgagcacaattactaaatgaggacaaaccactaatacaggcccttaaagatggatgccagggctaagcagctctccagcaagtcaagggtacttgtttcttcctgcagaaatgcaggccagcagaggaggtcctgcagatgagatgccaggctaaggctgggtaattgcccactgtttcagactgcaattatctccttagagaacagaagaatgccttcctctctgggagagaccacttaacttttgctgaggctcctccaggtgatcagtgctggggtcagagaggagaaagggtgaagtggggtcagccactaatctagcccccttattttatagataggaaaaccaaggctcaagagaagccaagaaatgtgagcagtcacagagctagctggttgcaaagccacacatgactcaaaaccagaaactcctgattccgagcctcccacttcccaaagttacacactaagcacctggacaccctgctaaaatgcagattcggtggggctgggggcaagactctgcattcctaagatgtttccaggtgacgccaatgttgcgggtccatggactacactttcaacagcaagtctctacactgttgtctggaaggatacagggatccttaaacttagcctctgattatattcaggctcaaactctccacttcagccagacaaatcctctaagattaacaaagatacttatttaaaatactaataattattattttgacattcattgaatacttatgtgccagcactgttccaaatacttacatgcattatttcatttaatactgaaaactctgtgagatggatactgtccctatcttacagataaggaagctgagactcagagaggttaggtaacttgtcctaagttgcacagctagtaaatggcagactcaagaatcaaattcagttctgtctgattcttaattaggtaatggctacataaaaatataccctttaatccttcccttctctgagctttgggagcctctccccagaatgttcttaacagttctccagccaaactatgtttcctccagtgatacttgtcctcagcttcctcataatgcagagtcctaaaagtcctttctccccagatctgtgtatacccaatggacctcaacaagttatttttagagttaaggtcagggagacacaagacgaaaaggagccgggactcagaataatgtgtaaatagatgatctacacagcaagacacatggtgatcttgctcaattagaggctgcatgtttgctctaagactatttcagcacaaactctgaaactgccttccaggctttgctggaagtatctgaatggaggagcaggtggtctgtggaactgcatagccaagggattgttgaggcttcctacagaaaatgagcaaatctctgggtgtgtacaagatttcatggcagaagcatggggcagggcctcctctgtatatgcttccaagctctactcaaacccagccctgtgttgtagcctcaccttcagggttatgaaccatccctagtcataccacatctaagtccatgttcataaaatgcgagctcatggctgtaaatgtttgttaaaggactatgaacagcacagtgcccataaccatgcattaattctcatgaagggactggtgtctagtgggcttgccccagttttgtgatatacctgcctgttctgactctggttcagttcttcagcagcttcttcagggctgtgagtgaggaggactctgggttgtttctaacaatgcttggtcctgtctcctggagaggtcttggaggcaaatagggtagacgaagagacatgaggccgtgacgggagagagcggccaggaggagggacattcagcagggctataggtcaccttaccaaacacgccacctctgcaaagtgggctgatctggccctgggggatggcccagtatgctggggtcttactgcctggaggcaagcagagtgatttttcttctggtcacaggcacctggctagctcactcccagtcctggctctactgttcacaagctatgccttctggggtgtactacttaacctttctgggtttccaaccctccgcctgcaaaatgtgcagataataaatgtgcaaaatgataaccagtccctccttcaaagcgttgtggtgagaactaaataagctagtgtataaaaagtatttagaatagtgcctaccatatagcttaaaaaggtgacggagagcttaaaaatacatatatcgtgacagacacagggcctggtccccactttggcagacagcaaaaggaggcattgcacgatgttttggcagaagatctaagagaaagtgcaccgtgtgtctctctttttcacacatagttacagaaagcggctgacactggggtacccacctttttagggcacactccagttcattcttctcctcatgggcttcttggagctgggagatgattctggtcaggaagtcttcaaagttggacagtaaatgaggttcctccttcttcagctgcaaccagagctgcttgacatcactttcactgcaagagaagggacgctcatgtggaagtgtggagatgaggcttcacgggaaatacagaggttcccagacaggaaactgacagccagaaacagtaccgtcagaatcattataaagatgacagtagctaacgtggaccgaatgcttgctgcatgtgaggagcttcaaggatatcagctcatttcgtcctcacaataaccctacaaggcaggagctgcaattaccccatttacagatgacgaagcaggtgaagagaggtggagtgagctgtctaagatcacccagcagtcactgatggagtcaggggtccagctcagggctgtctgactccggtgttggcctccttccccacctcgctctgctgcttctgttctcccgtggccttcacgacgggctcgtggggctgggcgtgcacagcaacatgctctggtgcatctccaaatgccaggaagaagacaggaggacaggagcccagtgcgtttaaggacacacactatggagctaaagcagagagctcgttgcccccaggaaggatggtcctcactgctgagaggtaaagacgtgccatgtgatggatggcagaaagcaattgtcactgcaggaagggaagagaatatgcagcaccccactgtggcctagtggcactagggatgactgacaggcaaaaagaagggaaggagcaagtctgaaagatgcgcacacacagaaagacaaggcgagagagacttgggagacccagaggccaatagacaaaggcacagaggcacgtgtgtacacagctcagtgacagagatacaggggctcaggctgacacccagggagggaatgaggaggagacacacatggtggaccctgttctccctttctggggaaactaaaaaatctgtggccaatgatcaagctaagttaaacataaatctgaaagaggataggttttaattcaataaaagttaataatttctcacagctagcagacagtagagtgttatagcatcaagtttgaaagttatataataataaacagtagagttcaagtgaaatttcacaggctagtttattataaattatcaattaaactttattctagcaaagtagagaataaatataaatcttatcccgcaaacaatcaggcttttgatttttttaaattaatgggcacatatgtattttccaacacttttttcacatctatataacaagatgtaataactagctcagttcattgtcttctcaaagtcttttgttacttaaatattcactctgtgtcttaatctttcaagtttccagctattgaaaatataagtccttcacctccttccatcctttcaacataattacattttgattttttactctgttaaactttgagactttatgtaatgtatatttcacatttaattaatttaacctgattatggaaaatcgcttatgaccctcgttttatgaggataaagttatctgtatgcctatacttctcttgagctctttccaaaatttgcttgtccattacagtcatctgcaccttgacaatctgccaccaacagattcctgttggctccccaggaatcctcaggataaagaataaaattatctgtgcttgtataacaagcattatattttagaaattttcttcggaagtgatatttgttagtgtcatgctagcaatgcccctgtggtatagacattactctctgcaccctgcagagaagaggcccactgagaaatgggtggtgacctcccatccctgtggcagcttgctccctgctgtggtgtgaatgtttatatctcctacaaattcatatgtttaaatcctaacccccaacatgatggcatcagtaggtgaggcctttgagaggtgattagatcatgaaggcagagccctcacaaatgggactagtgccattgacactgtgttctataattagtattgttttaaaactctgtatgctaactcccaaatatgatattaaataaatgtttatactattatgactacataaataatacccctggagaaccaggactcttcctaaaattacgccattatttgttttacttcctttccctgtcccacttccccaaatcccttgccagtttcttctgggagtacctcactaataaatcactttaagacaaaaaccacaaaaacagaaacgtaaatgtgacttgtcttccattaaattccagaaacagaagatctgaggatagctctgacaaggaaccctcaggagaaggaataaaatcctttgtgcttgcgttattaagcattatattttagaaaccttattcagaagggatattcaatagtgccatgctagcaacgctcttgggaaatggacatgactctctgcacccagcagagaagaggaccactgagaaataggcccacctctgatcagttatctggtcatctctaacacttcatccctctctccctcctttccttgctccatcacttccaccaattctttcttctatcccatccaaacatccgcgtacttatttagaccatccatccatccatccatccacccacccatttccttattaactcaacaagtatttattatgatctgttgtaaaccttgcactgtactggatgtcatgggtgaatctgggaaatgggagaaaaggaggtaaggaacctctctgtttctcagaatgagttccattcctcccagccccacaacacacacacagcatgttgtgggggtcttatttcatcctataggtaaaatttagatgtggcaaagggttcagagataagagggtctcagagagacaccatggtgacctcccatccctgttataggttgttccctgctgtggtgtgaatgtttatatctcctacaaattcatatgtttaaatcctaaccccaacatgatggtgccagaagatgaggactttgagaggtgattagatcatgaaggcagagccctcacgaatggcactagtgcccttataaaagaggccagaggaagctcattcacccttcctgccatatgaggacacagtgagaagacaactgtctgtgaatgagggaatgtgacctcatcagagagcaaatctgctggcaccttgatcttgaacttcctagcttccagaactgccagaaataaattttggttatttatataaagtaccacatctatggcaggtattacagcaaaccaaatggactgagacacgccaccatgaagtaaatgcattgtaaaatcaaggttcaccttgccagcccaggtctgtctgtccacacctgccaggttcctgatggagccaactgagctcaagtccccagtgagatttgcagacccacctgctcctcttccaacactctttgaactacttagtcatggcaacaacaacttgccccagatttctggagaagggacaagtctttcaacttttgatgaaaaacaagccaaagctcactaagctgccaaatcgcttagccaatcggaccaccaagaaaagtcaaagtgcagatgcccagtctcgaacttctagaacacaccaaggccacccctcctgggaggatatgggagtataggctagaaaggattctgggaggtttatcaatccatttcactgcttccagaacaacacacaaatcattttggtgagcaaaatctttaaagagccctcaaatattcatagccttttctatttccctatctgaggtctcacagccgtgaatgtttccctcatgctgcaatctaagcccacttcagtgaggatggaagtggctggtcaccatcttctgtgtatcatcttttacagaccactcttgaaacctccacaaaacctcctcttcttcgggacatctcattttggctcagttctgcactgccttactataggtcctcagagtcacgtctggtggactctaattgagaaccttgccagtaaggctgctaccctgcagtgagggctgggcagagaggccccttccttccgttacggtgcctcagctcacctgcactgccttctccttcccccttctccaggaggaggtgtcacactgtcaccaggaatggtctctgtgctctggcctgttgtccttggagaagctgggtcaggtgtatgactaatgagcttcccacccacctgtgccccttccacctgccagctacaccttctgtggtcgacacctgctgcagccccttccaggccttcagcaaacctgctactgctgctggtcttgagttccacttcctgtgtagcgcccccaccaggatcttccccaggcacttgcctatccctttcttgcctggaacacactttcgccagcctttcccagttctgccacagtctaccaaattgtttgctgaaaaattcacagagcttcggcctgcaaatcgtatataggcctcttctctcttgtctcctttttatcattttccaccctagccccttctcttcccaagctcaggaaatgtcagctgtaatcagtagggcattcccacactacaggaaacatacatctaacccaagacctaaggaccccaaaacaaaaaggccaaaggcaaaggctaaaggggcagaaggtattacatgcttttcaggccctctgtttggtttctactagctgtaacaccacattttccttattttattttactttacttcaatgtcagggcttagatccctgtgtctattccaaagcacattttaggaaaaaaaatggtggaggggtagttatgttttgtttgagatctcagccatctacaattttccaagtagtggcctgctaaaaactgcttcatttcccaccttggcttcctgcacaagcctggtttgccgaggataccgtgtgcaaatgcttccacatgatgggttttggccaggaaggcacccacagctggggcagctgggaggcaccgtagctctagagacccaggagaggtaaagatgctggggagctgatggtgataggaagccttagggagaactccatgaaaaaccctgagagcatggtacagacctctgatgtgtgagtgcctcatgaggagcaaggctgagccaaggactgggggataatgcatggccaggagtgaggaaggtagagggggtgggagagaaggagaataggaatgattcctaaagaaaaaaaaatgtaaacagcagagacagagcccaacacacagccaggtcatcacaaaggacaggcccccactggcagaaccagcgggcctttacctgcactgcattccagtgcagggaccagcaccacatggttaacaaatgttaattgttgaatggacacaggaagaggttcctaccaggctggtctccgttctacaaatcactgtcaccacttactcttccaacaccttttgggctccaagtctgtccatcagcatccggaactgggcttcctcatcttcgcccatgtcgcccagatcctcatcccctctggacagatacaccttctcttcatggcgctgggccacctgttcacctgcatcttcctgacttgggttattctggctgaagaagaagtgacctggggggtgcagggcacaaggatccgaattagaccatacccatccaggaagagctcagctttctcacctgccaggaatcattgaaggttcatctgagagaaggaaagggaagggaaagcccctccagcaaagatccatggacatgggtccgtggacacgttccagattctgtgacttttccacttccacaaacaccccatcagtgatgctagaatctgggaatggcagaatgtaagacggatacggtgtctcctttgtggttctcagtcccttaacatctggcttagaacgcatctccgttgatttcttctttaagcaacaaggcctttccctgcactgcattccagcaccctgactgcagaggctcctattgtcatcctagtcatcctcccgctagcatcactagacttcacatctacaagctccttaacagtttccagtgtacttcctccatactcatactgtccagtgttacagcagtctgtcttatcctcccaagtcaattagaagctcctgaaggtcaggaaaggcatcagatacttacaagaaaattatatggccccacacataaggcagatatatggcttttgatgtatctgataggatagtgtgtctggtttctttatattgttcatagatctcgattcttcttcctcctggttaccttgagaatgtctagtctgttcaaaccttctagaaattcctctgatagctgttatccctcaacctggaaaattcagccagacttgggttggaatgagccatccagttgtcccaccttttggccatttttctatgaaggcagaaaaggagaggctgcaaatctcatcacagctcccccttttatgctatggcttctgcagagcttccgtccatctcccttgccagtcccagtgggagggagcttggtaatggcagtgcagtgggcactgagcaagcggcaatgtaagcagttgagacgggcatgtgaggaggcccaagcaatctagagcctggagaccttgagctccaggtccctgaaaggagggcaggaaagctttactacctgccccccaggtctacaagggacaggaatgcaccttatacagtgttaggtagacccataaccctgaggtccccagcacccatcagaacttactaaatccagtagtgaactcctgtggggtcagatagccattgccatcagcatccagggcatcaaacacatcctccagttcctccaggctgagcggtagctccttatgcagcctctgaaaacaacccagagtgtactggttaacactgacactcactggtgggggaggtgacctgggactgcagagccttctgccagaaagtgtctagagttcggcccagtcctacaaaagccagtagaaagcttctgcatccagactgcttcaccatccctctcctcctttgcatgttagcacaactaccattgattgggtgcctacgaatgtactaggccatttgctaggtgatttataaataaacaaatatgtaaatatgcatttatttatctatctgcatttaattcccatgacaacactctgagctaggcactattatctctgttttacagatgaagtttgaggtgaaattacctgctccaaagtcacatggctagtaatgacatagccaggagtcaaatccagctctgattccaaagccagcactctcaacatctgtaaaggactcaaactgtacaggaccaaatactttcaggataatactcacacagcatggtgctgtaaagttgaatgcaatcatgaatgtaaagcatataacagtgcctgcatacagaaagcattcaatataaagtagtagggaggcagagagagagagagactcatggcccactgaggcccctcaaggaagtacgtggcagagccaggcttcaaaccctgtcttccctgctctccctaagccccctttcctctcccgtaccacgatgcgggtgcgggtcacttacttgaggcctctcctgctggaggcccctggtgtcccattgcctcagcactgcatttgtaagtgtctgtggacacacattttggtgcttgagctctgaggggatatgggataatcccccttcctacctctgagtgacccacacccaggccccgagtccaggttccactccagctccctgctgactggtaaggaattcctaataagatctcaactgccattggcttaaggtatcaaggccccaagagtatttgtgtgttaaagggggactggacaagatagtgtgaggaggttatcgctggatttgagtctagagcagactcagacctcataaggagggaagggcagagaacaattaataggcccaagagcaaagcagctgagctgttgctgctcccttctggccttctgcccgatgtgcaatggccccaagccaaggctaacttgcatagatgaagcaagtgtaccctcatacccaaataatctaggtctccaaatgagaactccccagagagttatatctcagccgatcctctcccttcctcccagttacctaagcggtaaccgtgcgaaattgccagtgtggaagtgactgacagctgaaaacaatgaatgcggggctttgtaagaagaaaggtatataccaacctcaacaataaaaaagagctggcaggtgtgaaagcccataacataattggcaagaatacttggcttgatcctatggcagttctagctgataagccataaagcttaatttggcaggtacatgcattaagggagactatgatgcattataaagtgggaagacaggctgatgtggaagccatttagaagaattgaattaaatatgaatgggcttttcagaaaaggaaggagagtgagagagagtgtgcaaagattctggaagtatatctgcttagcattcagcagaatctctgacttatcaacaatccataaaccagctgtctcaaaagctacagtaggagaacacgggtgaggagagagtcaattttgcaagcagggattttattagcatcattggaaataagaagcatcacacctgaggtagggtaaaagcgcaagctcctgtcacgctcacattccagtccttcctttggattatccttcctccttccccaccctcagactaggattgctggatctgattcaaaatgtggtctctcgcactgggctggagcaagaaatgagctgcaagaaaattccagagatcaacgggaccctcaacatgcctttcactcaaacaccccacacacttttctcatgttagcatgaaccaggagaggctagttcacagctcaccttaggcaccattcctgaatccagcagcacttcgaaccccaaatccccctgttgtctaatcccagttcttgtctacatctcaagtcagtttcctcctcccattgtcagcaaagatggggaaagcaatattataggttccaagtaattcttactactcaagtgctggcaagtcagcgctgagtgcttcttcagccttctctgcaactgattctatacctgattcttcactacacctgattctttcaccttgttttgttggccctccttgaaaaatcttttagtcttaataaccataattatctcttatttatcgctctgctcagggcctacagagccacagaaaaccagcttattctggtatggtcccctggtactgtttacattatttttattatttttattattactttttttttttttgagacagagtctcgctctgtcacccagcagagtaatgtgatctcagctcactgcaacctccgcctcccgggttcaagtgattctcctgccacagcctcctgggtagctgggactacaaacgcccaccaccacacccagttaatttttgtatttttagtagagacagggtttcaccatcttggccaggctggtcttgaactcctgaccttgtgatccacctgccttggcctcgcctcccaaagtgctgggattacaggcttgagccactggacctggcctacatttttaactaagtgagataagcagggtggaggggagcaagattatttattccactgtgcaataggcctgtgaggctctgagattagcctaaagtcacagtgcagaccacagctgggaaaagaactgattttccatccagggcttgagcaactgtctaatagttctccagggcattcattctgttattccctcaccttcattacctcccacacctacccacctaccagcaccaccaaaatcagaacacaaagtctctcttgccagcaccaagacccagccttccagagatcctgtggcacgcacagcttttcacacacctggaagggtgggccagggaaaaagagaggcatgaggaggaactcagcttcctattcgtactgcccatggccctgggagctcttgagaactccttggctcctttaaacaccagcctcactctttcttcactctcagctcctgcgtcacttcctccgtaaggcctttgcacctccccaggttaggtcaggttatacaagctccccaaactacctttctctcattcataaatctttcccaattagcattttatatactgatagatgtgactcattgatgaacgtctgctccctcagtgctctgagaacagggacctcattcgttaggcactgttgtgtccccaggatctagcccaatgctgacaaacatggactatttagataagtgttgaaggaaggcatagataagcgcttgactaagagcaatggcaggagaccctgagctcctatgtacagagtgctggtctagacctcacacactccagaacctgaccagcccaactgctaattctcagcaagactcatagtgactggcaaccttccagaacctagaacatgaggcatctacagcagcagtactgagagttcatgccccagagccacgggaaagtgatgtcttttgttgcactccagccaggctcctttaccttcctagtcaccagcccagtaacataccccatgtagcttaaagtgtatggttgcacagcttcaaacatgcttccatgacatttttattgaggaaaaaatcagaggatatccattttttatgtccagaattacactgtccctccttttggggcaatcacagcattcttttcagacccccattccagcaccaaccaccctcttccctgtggtacagttcagctataccaaatctctctaggacgagagtgggaggtgggagggcaggatcaacctttatcctgctttgcaccttgatgtgcttggcttgggctgattacgtggtataggccacagtttctcaaccttggcactaccgacattttggaatggacaatttttggttaagggggtagtggaggggaaggcaggggagggaccatcctgtgtattacaggatatgtagcagcatccctagcctttgcctgctaaacgccagcagcacttccctcaccagtcgtttcaataaaaaatgcctccatacattgtgtaaggaatatggctgtgctttggtcaaagatagaccgaggtagaatgtttacatcctgcgtgagtcagcaagtttagagtgcaggcgtataattccacttgttatcacagccatgtagccataacatgagaaggccatcacttggctgtacaccactattgtctgtaaaagatataattgtcctgttgacactgtgcaggcatgcttgcgcttgtgcccagagaaagagagagagtcagagctgcctgtcattgcagacagactgcggggagccaggacacatgcccaaagaaagaattaagctgctgaccctgaaggcaagggagagcgggccacgcagctgtgtgtgggagccgccagattaagtagccaagacagggcggacagtgtgagaaagctgttgatgaaagctgctgctgaataaaaccatattcacctgcctacggccccctgagtattgtttctgctcatccactcattccctccggacctcagcatgggctggaacctatccccaagcatgacaattggtgtagttgtgaacatgacacattgccatatgtcctccaggaggcaaaattgccgccactcatgtagattggacacaaagaataacagcagctggatacgagtggaaggttcccttttcagcagaaatgcccgtttcttttctctaagacaggacagacaacttgcaccttaaaattacaatgtgatggtgcagctattgtataaaatggtatggtgtctcctcaaaaaatttacaaaatagaattatcctataatccagcaattccacttctgggtatacacaccaaagaataaaaagcaaggtcttgaacagatatttgcccatccatgtccatatcagcattattcacatatagccaacaggcggaagctacccaagtatctactgacaaaggaatggagaaacaaaatgtggtatatacatacaatggaatattattcagcctttaaaaatattctgacacatgctacgatacagatgaaccttgaggacattatactaagtgaaataagccagtctcaaaaggacaaatattatataagtccacctatatacgataccttgagtagtccaattcagagagacagaaaatagaatgctggttgccaggggctgggagtgggcgaaatgaggacattgttttacgggtacagagtttctgttttgcatgataaaaagagttctggagataaatgataatggtggttgcagaagaaagtgaatgtacttaatgtcactgaactgcacacataaaaaatggttacaatggtaaattgtgtgttatctgtatcttaccacaattaaacacaatcacaatgcagaggacatcaggtactgggctaagatgtggcacatacacagtgcatttccagggatttccaggtcccagtctcagggctgagtgtgctacatgcttaagctcattcaattatcttttaatgctgggaggtagctataaataattcacagctgagaaactgtagcctagaggggttaagagacacaaattcgtattactagcaagttgcagattgaggattaaaacccaagttaatttactataaaaatcttttaaagttttctagttaacctaaatcaggagatagctggctttttctgaaaacagccagggagtgcatattctaggttttgtggaccattcggtctttgtcacatctacttccctctgccactgcagtgtgaaagtagccacggaaaacacataaaagaatgagcacatctgtgttccaagaaaactttacttacaaaaacaggtagtggcccagatttggttagtttgccaactcctaaatgagtcttaagtttggcatagccaagaattctgggcagtgttggggaggcaggtgcttggtgttggtagacaatccttttactcctccaaaaaatcagggaaacagggcttttgaggctctaggttttctcagagagatctcctgcccatcctctctccctctccctctcccagctgatggagtctcttcatgctctctgtagccttttcctctctgtcctttcctctgaggcaggactgactcagccccccgtgaagcttctagggtattgcaccagacctaaccctgcaaagcaacatctaccccaattctgtctggagagatccccaggaaacccagagagattcctcaagaaggacagtgtgacacctgaggagtcataagggaggctgaggactctctaaacttggttcatgcaggtcaacgtccatcatctgctacccctagagcagaacacatgcatttcacatgcccgagcagagggcagcttgtgctcctagcttgagtgtagcacacattgggctcatcctgggtttctccaggtttctcagggaccctgattaaaaacagcttaagcaccctgccctttctccctgtggtccctgctctatctgggtgagctggctacttactggtgggctccgatcacatggcagtctccccaccccttgacaattgtaaagccaatctcacaatccatttttaataagaagaaagaagaaaaacagccctggaggaggggcttgctcctctcatcccattttctttttttttttttttaacttttaagttcaaggatatatgtgcaggtttgttatataggtaaacttgtgtcatgggggtttgttgtacatattatttcatcacccaggtattaagactagtacccattagttatttttccggatcctctcccttcttccatcctccactgtccaaccagccccagtgtgtgttgtccccctccaccatgtgtccatgtgttctcatcctttagctcccacttataagtaggaacatgtggtatttgattttctgttcctgaattagtttgctatggataatggcctccagctccatccaagttgctgcaaaagatatgatcttgttctttttatggctgcatagtattccatggtgtatatgtatcagattttctttatccagtctaccattgatgggcatttaggttgattccatgtctttgctcctgtgaatggtgctacaatggacacatacatgtgtctttgtgtcagaatgatttctattcctttgggtatatacccagtaatgggattgctgggtccatggtagttctgtttctaggtttttgaggaattgcacactgctttccacaatggttgaacgaatttacactcccaccaacagtgtgtaagtgttcctttatctctgcaaccttgccagcacctgttattttttggctttttagtaatagccattctgactagtgtgagatggtatctcattgtggttttgatttgcgtttctctagtgatcagtgatgacctttttttcatatgcttgttggacacatgtatgtcttcttttgaaaagtttctattcatgtcttttgcccacttttttatgggattgcttgtttctttcttataaatttgtgtaagttccttgtagatgctgtatattagacctttgtcagtgcatagtttgcaaaacttttctcccattctgtaggttgtctgtttactctgttgatagtttcttttgctgtgcagaagctctttagtttaattagattccatttgtcaatttttgcttttgttacaattgcttttggcatcttcctcatgaaatccttgcccactcttatgtccagaattgtattgcctaagttgtcttccagggtttttatagttttgggctttacatttaagtctgtaatccattttgagttttgttttgtatattgtaaggaaggggtccagttttgatatattctgcatatgactagccagttatcccagcaccatttattgaatagggagtcctttccccattgcttgtttttgttagctttgtcaaagatcagatggttgtgggtgtgcagccttatttctgggctctctattctgttccatttgtctatgtgtctgtttttgtgtcagtaccatgctgttttggttactatagccctgtcgtatagtttgaagttgggtaatgttatgcctccagctttgttctttctgcttaggattgtcttggctatttgagctcttttggttccatatgaattttaaaatagttttttctagttctgtgaataatgtccttggtagtttgacatgaatggcattgaatgtataaatcgctttaggcagtatggccattttagtgatactgattcttctgatgcatgagcatagaatgtttttccctttgtttgtgtcatctctgatttctctgagcagtgtttttagttctccttatacagatctttcaccttcctggttagctgtattcctagctgtattccttagctgtattttattgtttttgtggcaattgtgaatgggaatatcttcctgatttggctcttggtttggctgttgttggtgtataggaatgctaatgattttgtacaaagtactgagactttgttgaagttgtttatcagcttagggagcttttgggctgagactatggggttttttagatgtagaatcatgtcttctgcaaacagggatagcttgacttcctctcttcctaaatggatgtgctttatttctttcttttgcctgattgctctagccaggacttcctatagtatgttgaataggagtggtgagagagggcatccttgtcttgtgctggttttcaaggggaatgcttccagcttttgaccattcagtatgatgttggctgttggtttgccatagatggctcttattattttgaggtatgttccttcaatacctagtttgttgagagtttttaacatgaggtgctgttgaatcttatcaaaagtcttttctgcatctattgagataatcatgtggttttgcctttagttttgtttatgtgatgaattacatttattgatttgtgtatgttgaaccaaccttgcatcccagggataaagcttacttgatcatggtgagtaagctttttggtgtgctgttggatttggtttgccagtattttgttgaggaattttgcatcaatgttcatcaaggatattggcctgaagttttctttttttgttgtgtctctgccaggttttgatatcaggatgatgctggcctcatagagtgagttagagaggaatctctcctcctcaattttttttaatagtttcggtaggaatggtaccagcttttctttttttttttggttggtaggctatttattactgattcagtttcagagctcataatttgtctgttcagggattcaatttcttcctggctcagtcttggaagggtgtatatgtccaggaatttatcaacttcttctagattttctaatttgtgtgcatagaggtgtccataatattctttgatggttatttgtatttttgtgtagtcagtagtaatattgcctttgccattactaattgtgtttatttggagcttctctcttttcttctttattagtttttctaatgatctatctattttattaactttttttttcaaaaaaagaaaaaacctcctggattcattgatctttctaatggtttttcgtgttccaatctccttgagttcagctctgattatggttatttcttgtcttctgccagctttaggattggtttgctcttggttctctagttcttttaattgtgatattaggttgctaaattgagaactttctaactttttaatgtgagcatttagtgctataaatttacctcttaacactgccttaggtgtgtcccagatattctggtatgttgtatctttgttttcattagtttcaaagaatttcttgatttctgtcttagtttctttaattaccccaaagtcattcatgagcaggttattcaatttccatgtaattgtatggtttttagtaaatttcttagtcttcatttctaatccgattgtgctgtggtctgacagagtggttgttatgatttcagttcttttgtatttgctgaggagtgttttatgtccaattatgtggccaaattaagagtatgtgccatgtggtgatgagaagaatgtatgttctgttgtttgggggtggagagttctgtagatgtctatcaggtccatttggtccattgctgggttcaggtcctgaatatccttgttaattttctgcctcattgatctgtctaatactgtcagtggggtgttgaagtcttccactattatagtgtgggagtctaagtctctttgaaggtctctaagaacttgctttatgaatctgggtgctcctgtgttgggtacatatatattgaagatagttaggtcttcttattgaattgaatcctttaccattatgtaatgcccttctttgtctttcttggtttaaagtctgttttgtctgaaatcaggattgcaacccctgctttttttctgttttccattcgcctgctagatttttctccatccctatattttgagcctatgtgtgtcactgcaagtgagatgggtctcttgaagatagcataccaatgggtcttggttctttatccagcttgtcactctctgccttttaattgggggcatttagcctgtttatattcaaggttattattaacatgtggatgtgatcttgtcatgttgtaagctggttatgcagacttgtttgtgtggttgctgtatagtttcactggtctgcgtacttaagtgtgtttttgtagtggctggtaacagtctctcctttcatatttagtgcttccttcaggagctcttgtaaagcaggtcagtggtaacaaattccctcaggatttgcttgtctgaaaggtatcttaattctccttcacttacaaagcttagtttggctggatatgaaattctgggttgaagtttcttttatttatgtatgttgaatactggtccccaatctcttctggcttgcagggtttctaccgagaagtctgctgttagtctgatgggcttccctttgtaggtgacctgacctttatagctgcctttaacattttttctttcatttcaatcttggaaaatctgattattatgtgttttgaggattgaggatgatcttcttgtgaagtatcttactggggttctctgcatttcctgaatttgaatgttggcctctctagctaggttggggaagttctcatggatgatatcctgaaatatgtttccaaagtgcttacattctccctatctctttcagggacaccagtaagtcatagattttgtctctttacataatcccatatttctcagaggttttattcattgattctcattcttttttctctattcttgtctgactgtcttatttcagaaagccagtcttcaagctctgagattccttcctctgtttggtctattctgctattaatacttgtgattgaatcatgaaattcttgtagtgtagtttttcagatctatctggtcagttacattgttttctatactggctattttgtctgtcagctgctatatcattttattgtgattcttagcttccttggattgggtttcaatgtatgcctgcatctcaatgatcctcattcctactcatatgccaaattttctttttgtcacatcagccatctcagcccagttcagaaccctttctggagaggtagtgctattgaaggcactctggctttttgagttgtcagagttcttgcactgatcctttctcatctttgtgggctgatgtttctttagtctttgaagttgctgacctttggatttttttttccttttatcctattcgatgacctggagggtttgattgtggtatgaggtgggttcagctgactggcttcatttctggaagattttagggggccaatgctcagctcccaactcctggactgtgtgctctaactctaggggacctgtatcaggccctggttttttttctctggctcctcaaggttaggaatccacgctgggggtgggggtggggttgggggtgaggtgcttctggaccattggtcactatgttccagtgggtggtgtcagccagccaaagcattttgtagtgtggtggcagtgggatctgtccttctttgtacgtgccaacagcagcagtggcagcagcatggtggggtgcacacttattggctgcagcagggtgccagtgggtgctagagtgcctgcctctgtgtgggtgttcagtacagtaatgaaggcagcatggcttgggggccagaggcccctgtgggcaactgtgtgcatagttgtgctggtggtggtggtagcatgggggtgaggcactggctagtgcaagtctacgtgcactctctccatcaccacagtcatgggtgatcactcagggcagggaaaggttttgctgttctctgtgcctagtttcacttctgtggcagtgttggcatcagagtggggcactggtgagggtgtggctggctggctctgtgccccccaacgctccaactgcaatggtggtccagcagaagagggaggcagagtgcactctggccacagcagtggcagaacagggtgcatgcacacgtgcgtgctggcagggcaaggaaggcaaaacctgcctgcacacacatgcaccggcaaagcaatgcgggggctgccgtgggcctgggggaagctgcaacgtgaggagggagcaggcaggctggcacatggccttacgggctgccctactggagctctctgccagtcagccacaagtctaccagcacaggagctatgatgcgggcccccaggacacctgcggctgctccacaagcaagcgcatccaggctgggtccctcagagaggccagcagaccaaggggtgctcaggtcagaccagccctgtctgatggacaagaccgccctgcagagttcaggtctgacagttcctctaggactaaagtctcctgtgggagtaagtcgagcctagggagatgggtttcttgtaaaacaggtcagtgctaacaaattccctcagcatttgcttgcctaaaaaggatcttatttctccgcttatgaagctcagtttggctggatatgaaattctgggttagaatttcttctcttacggtatgttgaatattggcccccaatctcttctggcttgtagggtttctactgagaagtctgctgttagtctgatgggcttccctttgtaggtgacctgacctttctccatagctacctttaacattttttctttcatttcagtcttggagaatctgattattatgtgtcttgaggatgatcttcttgtgaagtatcttactggggttctttgcatctggctgtgctctcctacagacgctcccacatcaaaccctctgggctctgcatcagctggcgtggcgcctctacttctctaagcacttctccctgccaaatcgagtgtccatggtggttgaggggtctcctcctgctgggttccaggggcccgtggagagagtgggttgctcattgccagttcaactcagccattcccctggagttgttgggggctgggaatgagtccccgtgcatggtagccccatgcaggattcccagcttcctcccctttcagcccagattctgtgtcttccctccaaccactctcagtgtcttccctctgaagatctgttaggagtgcaccagtcatcttgttcctttggtggcagctgttccacctggctgcgtctagttggccatgttggccagcaccccattccattttcaaaacaaatgcaagctgtctgtgactttcttcccacttggcttctccactagctcctcagcctcctgtgttctccctcccacatggcctgcagcctctccttccttgaagaccactctctgctgtcaaggacctttcctgctttctgaatttgtgtgtatatgaaaaatgtgagtactttcccttccagttcccatgaggctgtgctgggagcctaaagtaaaaaaggcggtggtggccaggcccaggaagctggacaccaaccaaagggggtgactgtatgcacaccgcagccccatgtggaagtgacaagccaacaacacagatgcctggaggacctgctccaggagaaccggggggcatggggactttctgcagagagccacagctgaccatgagaagcctgttgttcttcttcttcatgcatctcccccagcccatcttccttcagaggtggccagccgaagcagccagagatggtgcttaaatgacacgctcagttccctctcttgacagcacttgccagcctgaagaactaagcatttcaagtgcttcactgaccacaggttcagaaaaacttcagaaaattaagtagacagcagaaataaatgctgtggatgccaagttatcggcttggtggcttgttgattcaggtgttctcctgcctggatcaggagtgaggactggggaggaaggttgagtcagtatttctgggacttaatgtttctgactatatttcaagtcaaatacaagcgatttctttaaaactttatacctagtttcaattctccatgcctcctcatcccttcattaaagagtggagctcaatgagagttaattaggttatatacagcaagagtgctgagttgcacagtacttgtggcccagagttgacctccataaacatgaatttccttttctttctgtctagagggaataatcaaaagttaagcctgattttgaaactactaacaccaaccaccgctactgcagacctgtgaatgccaattatgaagttcacagacaggggtttgtcaaaggtttcctcaaaacacactgaatctggccttccacatggagtgagcctttgaggactgggttttggtgacagaaacttactgggggagtcatcactgcaaagaagggtaggttgggctcaattgtgggctgagctggtgttccccaggtcttttccctcaatttgtgcaacagttagagagtggaatagctccaggagaagcataagaacaccaccacatggggccagggaaagaactgccacacttcaccttgggtcacacagctcctttcacagcctccacacctcggagctcacatgcatgagcagagatggggctgagcctaatgagggtccccatttcattgcccaactttggtatattctgaaaaactagacttaaagaaagagagcctagccattgtgcttcctccaacagcacagggatgcgtcccttcaaaaactactctgatggagtgagtgacacaaagactcaggggaaaagagctgctttcaaagtactctagtgaagtctgtattttattcacccatgttcaagtgaaatcttgactgcagcataagagacttcagtcagacactgagaagtttttgaaactaaagaaagaaaggcatcaaaccaggagtgggcaaactctgcccctgggctaaaccagcaatcccctattttggtgtggctagtgagttaagcctggtttttacatttttaaatggtcaaaaagaaatatcaaaagaataacagtacttggtgacacatggaaattatataaaattcaaacttccttgtccataaataaagttttattggaacacggcaccctcatttgttcacatattgcctatggatgcttttgtgctgcaacagcagagatgagtagttgtgatagagactgtaaggtccacaaagtggaaaatatttattctctggacctttatgaaaaggctgccgggccctgcactaggcaatggtgtgcactgatgctctgcataccatctctctggagaatctcttcaggagattgcagtgtatttgggtttgaaggcgagacatgggtaaaatgacctcagaaatgccttcctctcatgttgtgggagaggctgtacctattcctaaggtacagacagcaggaacgactttgttataactcaagttgatgcctttctacttttagtttcagaaggttcttctcgtgtcttacttaagtcccttacgttactgttatcatttcccacaatcctggagagctactgaggcagagaggaaatagccctggaatctgacagcaagtaaaggccagaaatagaatgaactcaggaggtccggctcctagtagagtttgggcagatccttccttccaagacagaactggtggcatcttttctgttaaggatgtcacctcccacggggcaagctctaacccaagacaggaagacatctggcattctcagtgggcaggcctacctgggaccccacttacctgcatatccttcctggcgatgaagcccttgccttcagcatcacaggtctgaaagaactcctgtgccttcctcagcatgactagctggcccgacgtttgctcctgagtctccttctgctccaggctgtccaggggatgcaggcaggctccactcccctttggcccctggccagacccctgaccaagtctctggggtctggagactaccctcccgtcaggggcagccatcgcgattagtcagtttcttgaagtctttttcagaacctgaacatagaaaatgggagagagaagtgggtgtggtgggttggagtgaggctgaaaaagaacaagaggggatgagaaggaagcacagagccatacaccagtgtgtccaggaatctcttagcaactacctcttaattagcaaaagctcaggacaaggggaaaatattccatgatcactaatagatcagcaagcccatcaaagggaggagggaagagtgcggaaagaagacagacatctccagattgaaaggagatggaataggggaagcccaaaaataatttcttcccatttaaacaaccaaacaacaacaaaacagatcctgatagaccagctgccatttatagagcgtttacttagacaccatgccatggcctctatatacatttttttcatgtaattctcacatctctctgacatagccattatcatcttcattttagcagtgtgaaaactgaggctcagagaggttgcgtgacttgcccaatatcacacagcaaattactacaaaagctgagattgaaatccaagcctgtacaacttgtatgatctcagtcccaccctgtcctgactcctcagcattgctgagggtggaaagctctcctcaggtggatgcacttgctcctacatcattcacagtcaacaagttcttggtgagctcttgcccaatgtcatagacctcggccacagctgtgagctctgcagtttatttacgtaggagaaaatgtgccccattctcaaggagcttcatgttgtagaggacttgccaggcctggtttggtgacacccaaggctgttttcagcccaaaccgaatcacaaatcatacacttcaatcagacttttaaagaccctgaaggagtgttttcagagggtgtcttgcaatgtgatgtggaagagggcatacggaaacctggcttctggactccactgctgcttatatgaccttgaacaagtcggtacctgtctgggcctcagtttccttatctgtatgaggagaacactggacctgtttgtctttaaggtcccttctagttctgagcatctgtaagtctgtgaaatcgccacatcataaaatgttatgaattataaatgttattaatacaaaactaagttcatgggataaaaggaaataataacatccttggatttttttttccatctgaagactttttggaagtagaataggtccacattttaaatacacgatgacatttgggtttaaaaatagagatatgcactgtcatgcattttgtggcgagctggagaatgtgatgctctggatcatatttcctgtgtccatgtgagtaagaaaggaggaaaagaagtgaatcaccaggcaggtttctctgattaccaggccctgggcctcaggctcagctataccatgtccagagcaatgtaaaatctgttgatttcagtgatgatcttccacttaaccagatttgtcaagagctgtgggccagagctggaagagctcctggcctcaggaatgaacttcatgtaataaggccttgacattgcagatcaggctacaccctttgctccgtgtggctgaacatgtaattcccacactgacccatctgaccagccccatcctcaggaaatgttctttctcgtcatctctgtgtgtgaactgaccatcacctaatcctaagcagatttaacattttcattctgtcttccccagagggagctgccttggatggaagcctgagggggcagggctgtgtctccatggcttttatgtgcattgttcagcccgcctgcatgaagtgctggctttggaagggcttttggataatgatggtggtaacgtgagcttctgtaaatataccacatgagcagaacaggctgttgtcttcctggtaccttgccgggactctgtctgcaaggtctctgcacccaagaggccccaccctactcccacctgctgctcccaggagatgaggttaataatatctgtcattccttgagtgctttctcttgccaggcccctagcatacttcatcttattgaacctgacatcctcccatatggtaagtataattaggattcccattatacagatgaggaaactgaattttggagaggttaatttgtatcagggtctagcacagtcagagacctcttctgctatacacattgccttcctgagacccagttgtgggcttgctcttaacagtgtactcatccccaactgatctaaatcacctcccagaggcatattcatcattttaacgggaacgtctttaattcattcattcattcatccattcatttatttccatctactgattaccatgcagcaagctctgagctaacactgtgaaatagtgttaggtgaaatagtgaataggacatggtccctgcccttaatgaatgagtctctgagagtccctaatggtgggatttcaataatggtgactgatagttggggaagatgttttagattgagtcctatatagactctgtagtaatcaactactattaaatagctgtgtgaccttaagtgagccctcaagtcactctgggcctgagaaatagtagagaggatttcttagttccagatctgatgtttgctggctttctaacttccctagaccactttccctctacctctgcccacctggtaacaacaggtgatgcatgacatgaaagaatcaactagtagttctagagaagtcagctatgagcaaccagtagacaggcaccatgtcttattcgattttaccgccagtttctagcctagaatatggtacatagtagtactcactgatcattgcatgaaggaagatcaatcttttgctgaagtcttcagaggagggcctgcaagcatttttatttcaggcaggtagctctatatgtggaatttttatcttataatgagtaagtctagacttctgtttccagaaaagatgtagtatcagaggctggatttaccctcccaattgaaataaccaaaattccagagagaatataactttaaaaatggttttcaagacactagacaccaggaatgaaggatggtgatccttaagcaggggcaggactatattgagctgagtgaagcccctaccgaacaggatttaaaaagacatctactctcaggagctaaccctgcacttacacaaccctgagaattagtatcttcctaagagtcagctgcttagggtacaaaaatctaaggaggctttcacttgcaaaattgtgcatctgacagtgatttctgccttaaattttttttgtcataggggcttcacttatcttactctagttcaagctctgttcctgagacataggaaagaaacaaaatgaaccccaagtgtgccctgtcttattatctaaagagtttttaggtcatggcacggggaggggaaacacaggcacagcttggtagactacctatgttgaggaaacccaactatatcctgcctacaagaaatgtgctttacacataaagacacaaactgttaaaagtaaaaggctggaaaaagatataacacattaacattagttaagagaatactgcatattaatatcaggcaaaatggattacagaaggaaggatattagcgggaattaaaaagtcatttcgtattgataaaaggtcaatccatcaatatgctataataatgctaaacacttatgtgtctaatagcagagcttcaaaatacacaaagcacaaactgattgaactccaaggaaaaatagcaaagtcacaatgatatccaaagatttcaataactttctctctcaataatttataaaacaagtagacagaaatccgtaaggatacagatgatttgaatactatcaaccatcttgacttaattgacatttatagaacactccacccaatgacagctaaatatacttttcaaatacacatggaatactgaccaagataatccatattctgggtcataaaatgagtcttaataaatttaaaagaattcagtttgtacaaagtatgtactctgaccacaatggaattacattagaaaccaataacagagagacctctggaaaatgtccaagtatttggaaagacagtaacacacttctaaacaactcatgggccaaagaaaaaaaggaaaggggaaatgaaaaaatatattgaactaaatggaaaaaaaaaagcacaatatatcaaatgttgtgggatactgctaaagcagtactaaggaaaaaatttatagcgctaatcatatatacttggaaagaagaaagggctcaaatcaatgacctcagattttaccttgagaaacaagaaaaataaatacaaattaaacccaacgtaaggagaaaaaaataataaggatcggagaagaaaaaatgaaatagaaagcagaaaagcaatggagaaaatcaacaaaactaaaagctggttctttgagaagattaataaagagacaagacacaaattacaatagtagcaatgtgaggtgatatcattacagatactatagacattaaaaggctaataagagaatattatgaataactttatgccaacaaacttgacaatttagattagatgaactgattccttgaaaaacactaaataccacagctcactcaaggagagatagattacatgaataattctatatctgccaaagaaattgacctgatagttaaacaaaaaatcttcccacaagaaaacttcaggtccgcatagctaaattgatgaattctatcaaatatttaaagaataagtaataccaattctataccgactctttcagaaaattgaagactaggaaatacttcctaacatattatatgaggctagcattaccctgataccaaaactgaatgaagatattacagaaaaaaaataggccaatatcccttatgaacacagatgtaatcattcttcaggaaattgtaacagattgagttcaacaccatataaaaagatgataatcctgaccaaccagggtttatctgagaaatgcaagaatggtttaacatttgaaaatcaataatgtaatttaccatattaacaaattttaaaagataaaccttttgatcatctcaatagatacagaaaacgcatctgacaaaagctactcctgataaaaactaagagaactaggaataggaaggaactggcccaacacgaaaatgggcatctacgaaaacaacagctaacatcatacttaagggtgaaagaccaaatgttttgctcctggggtcaagaaaaagacaagaatatctgttcttaccacttctattcaacattgtgttggagattttagctagctcaatggagcaagaaaaagaaataaaatacattcagattggaaaggaaaaagttaaattgtctttattcccagacagcaggagtgcttatataaaaaaaatctgatgaaattcacaaaaagctacttataaaataagtgaatttgacaaggttgcaggacacacactcagtatatgataatcaattgtatttatctatactaacaaaaaaaaattaaaattgaaataaaaatatcatttgcaattgtataaaaatatgagatatgaatatatctgacaaaggatgtctaatacttatacactgaaagctataaaatatcaatgagaatacaaagaagacctaaaacaaatggagagatatgccatgttcatgggatcgagagactcaatattattaagatgtcatttcttcctaagtccaatagattcatctcaattccagtcaaaatcccaccaggcttatttgtagaaactgataacctgatttagaattcacacaaaaatgagaaaaacctagaatagccaaaacaactttgaaaaagaagaacaaaattggaagacaaacactacctgatttcaagacttattataaagctatagtaggcaagacagtgctactggcataaagacacacaaacagataaatggaacagaatatagaacagagaagccaaaaatagacccatgtatataaatgattttttggcaaagatgcaaggcaattcagaggataaagcatagatttttccaacaaatgatactgaaacaattgaatatccatttgcaaaaacagcttttttgttttttgttttgagacagagtcttgctcaggctggagtgcagtggcgcgatctctggcttactgcaagctccacctcccaggttacgccattctcctgcctcagcctcccgagtacctgggactacaggcgcccgccaccacgcccagctaattttttatatttttagtagagatggggtttcaccatagccaggatggtcttgatctcctgacttcatgatccgcccaccttggcctcccaaagtgctgggattacaggcatgagccaccgcacccagctgcaaaaagaattttaattcgcactttgtaccatatacaaaaaataactacaatgtatcatggacctaaatgtaaaacctgtaaacataaaacttcaagaaggaaacatctttgtgaccttagctttggcaaaagtttcttgggtataacaacaaaagtgcaattcatttgaaaaaaatacgacaaattggtcttcatcaaaatttgaaacatctgctctttgaaagatacaatttaagtgaatgaaaagcaagccacagactgagaaaaagtatttacaaaacacatatctaatacagggtttttatctagaacacataaagaactttcaaaactcattaataagaaaacaaacaacccactttttaaaatgggcaaaacatttgaacaggcacttcaccaaacaagatatagggatatcaaacaactacataaaaagatattcaccctcattacttataagagacatgcaactgaaaaccacaatgaaataccactacacacctattggaatggctaacattatgaagattgactgtaccaactcttggcaaagatgtggagcacctggaactctcatatattgctagtaaaaatgtaaagcagtaccattcctttggaaaacatttgacagtttcttagaaagtcaaacaagtgtttaatccagccatcctagtcctaaatatttactcaagagaagaaaagcatgtgtacatacaaagacttgtacatgactgttcatagcacttttatttgtaatagcaaaaaacaatgacccaaatgttcgttgacaggtaaatggatagacaaattatggaatgccattcttaattaaagggaatgaactgttgatccaaagcaccaaaatgaacaaatctcaaaataatcatgtgagtgacagaagccagacaagaaaggcacatttcatttatataaaactctaaaaaatgaaaacatttgttagaagaaaagaagtgacagtaggcaggagtgagaaggagggattaccaaggggcaacaggaaattttggggggtgtggatatgtctgctaccttaagttcatgaatatgatatatgattccatgatagtttcctggacttatttattcatacacacacacatatacacatatacaaatgtatattaaaactgatcaaatggtacactttacatataatgcagtctattatatgtcaatagctgaacacatctattaaaaaatagaaaagaagaatgggtctgggtcagaaccttcttctgtctcccaggccttgcaaatctagtccagtccattgtacttatcccaggagcctgattctgtcttttacattcaactctggcaagcaggaaatggctgaaaattaagcaatttccctgtgaaaactttcagtctgtttgtggagggagctaaataaaccctacaaataaagaagcaggcagagccccttgtgaagaccactgatctaacacgacttcagcctcttctctcttaaccctgtgtcccctggctagacctgcagtctttgctgagcgtctgtggctttctcaagaccagtggaaaacaaaacagcagaagtgcttctactttcatttccaaataaagtggaagccctgcatgagctcggctgtctcccatttggatgaagcccaaggatgccttaatctcagggctagacatagctttttgtctcagagatttgccattagaccaacagacagtaagcacatccataaaggaggaaatggtggagtatattctaaaggcaaagggaaaagaccaccacaaggagaaaagagaaaatactttttatctgcctgactctgtgagagtttccaggccactctcctccctccagaatgattccataaaagccgttataaacagatgggaattatccagtccttaaatatatccaggaagatttcccagatatccaaggtaattctagcagcttagtaactgctacaatcagaaagttcgtagatcaaacctaaatccctcctaagggttctaagctaattttccccttaatctagagaacagctggtatctccttccacaccacaccagtggcaaacctgaaagcagccgctaagtcatccagatttcccttgaatgtctcctgcagcacagagttaggaaactgaaaggccaaaaagcatctccaggatccattgacatctctttaaccacccaggcttcagtgggagggatcctccataaacagcagtacctggaagccccagtgattaactcggagctggcgatgcctgataaaggcaaagagataggtgggtctcttcaaactgcagagaggaggaggacttgggattagtatctgatgtgagtgccgtcttgtggaacagaccccttaaactgtggggtccgcactaactggataatgtcggaattgaattgacttataggatacacatttggtgtcagaaaaaaagacactacaatatttaacaatcaattttctgggttggtgtagggggcatccctaatttgtagcatctgcctatctctgtggtgtcaatattcccactgtgaccaatttcaacctaccaacaatctatcagctctcaccaagaaagagattgagtggctgatgtttctggaaaagggaatcagcatccctagcactgtttgcacaggtgatagtagctgatacctctttagaaagtatcccctcaaccctaaacgtatagggcaggacccattattaaatgtcttagtacttggggggaaacgtggggtttcacagggggatcaccagttcttcatgcctgtgcctcttctatacaccccatgacctgggcaggcccttgagtgggggcaggagacaaggcagatgcagggaccctgatggcgaggaacagagatgctgagctgcgtctcacagggctgctctctccacccccgtgcaggaggaaagcacttggcacaggagccaaacccagccagaaatgagacttgtccctgttccataggagagtgttatttatttctttgacacatagtgaagtagggggctttggacaaataccaccccttctctgataggcctcctgctgtggtggataagaacataaattccaaggccagagtgcctgagttagctgtatgactctggcaagtttcttaagctctctgaacttcattttcctcatctgtaaaatgaagggccagggtagcaacttacatgtgtcagctattacttatttatttagagacggagtctcactctgttgcccgggctgaagtgcagtggcatgatctcagctcacggcaacctctggcccctggattcaagcaagtctcctgcctcagtttcccaagtagctgtgattacaggtgtgtgccaccacgcccagctaatttttttatcacttttagtagagtcggggtttcaccacgttggccaggctggtcttgaactcctgacctcaagtggtccacctgcctcagcctcccaaagtgctgggattacaggcatgagccaccacacccagtctgtcagctattattactacattgaaatcaaattggcttcctccacctcagattatattataataaaatgaactaataaaagaacgaaaaacaaaacaaaacaaaattacatgaagagaaacaaccaagaggtccaaaaatctacccttgactcccccagctggacaggatttcctggtgtgattttccctaccccaggccaccaagaaggtgaatatgccccaccagccatataaaggggcaggtggatggaggtgcatttgactgcctttgaaatgcgcagtctttccactctgcagcctgctgtagcttctgccatgctctatccagcatcccttctcctcaaattaggtccaattttcttgttctagtctcaagggagacagggaacagctgtctcctacctctgtaaaatactcttccaggtctggacaactatcattaaacagcccccttcacacttctcttgctctattataagatacattaaaagccttgataatgatttgaggtctctgtgagatggttgctgttcaccctaattccttcaataattagtggttgtaaaccactttgaagataaaaggcattttataagaactaagccctattatgattagctttccaatatttccttgctaaagccaatgagaacatcaaagccaaacatagccacagcatggtatctggtggttaattagatgtatttcaaggcgtctggtatatattaaagaaactgctacaaaatttatcaacattaaaaaagtgtctgctttcttcccatgaacaagcttttttcaaaggctgtcagtgctgatgcctgcaagacaagtgcctgaagaggacaaattgctcatgtattccctgggcccggaagagagagatgtaataataacacctggcttggtataacatcctttcttatcgttgtctatacaattctatatataccagatctccttttgttttgtttttgcaattatgctgtaatataagcaagtaaagtaacactatccccactttacaggtaaggaagttgcatatgatgatgaagtttagaagcagatcagtgtgatgtatctggacaaagtcggggctgcagatccgttatcaaggtggtattatcgatgctccattcagatacccttgaatactttttgtggaccctccctcagcatccgtgtgctttcgcttctatctttctgaacctgtaactcttagaaggtggacccttgagctattgattgacccactttgtccacatggacagagccagaagtgcctggaagtttcccccacccctctaaagagcccttatccaacgactgacaggcgtggaattatgaaagcccggtcctcctgcctccagaggggacaaactctagttgtgatttacactttagaacacttttctggggacagaggctggaactttgctgagatctcactatgtgtggctttctcctacctcccatcctgcttccccatcccttatcaggttcccctggaagcattttcttttcttttcttttctttttttgagacggagtctcactcagtcgcccaggctggagtgcagtggcgccatctcggctcactacaagctccgcctcccgggttcgcgccattctcctgcctcagcctcccgagtagctgggactacaggtgcccgccaccacgcccggctaattttttgtattttttagtagagacggggtttcaccgtgttagccaggatggtctcgttctcctgacctcgtgatccgccggcctcggcctcccaaagtgctgggattacaggcgtgagccatcatgcccggccagcattttcttaataaatcacctgaatatgactcttcctctcaaggttggcttctgggagcccaatctaagataattcttttgacccaacattaatgacaacattttgtatattttctatgcgatatattctcccagttccaaaccttcaagtctccagacctaaatatctatgttttctgtgtctgctcctaggcccttaactcttagcactctattctcaaagcctctctttctcttggattatgatgttccaactctttctggaaaaatggttgcaatttctccagctacgtggaaggcactgaacctggcagctgatgtgggagatacagatttgtattgtctttcacaatgcactgacaatctagcaggggacaacgtacaaacagcagaggtagaggaggtgagaagagccacttgtgtgtgcaataaaaactgtaggcacaaacaactctcagagcggtccccaaaaataaaactactctccagtaattttctacaccatacaattctgactcattttacttaatttttgaagcagaagcttctctcaaatgtttaaggaaatgaaagtcagctatggtagagataatccaaatgagtggataatccaataaagaggaggttttctttaaatctgctttgcattattctttatagtagcaccacaggaagctgtttcagaaaagttaagtaatttattgtaggaaaacagctaattcatgaattcaatcttaagtctgcctgactctttacaacctcagtttctggctgggcgcagtggctcacgcctgtaatcccagcactttgggaggctgaggtggatggatcacttgaggtcaggagttcacaaccagcctggccaacatggtgaaactccgtctctactaaaaataaaaaattagccgggcatggtggcacatgcctgtaattccagttactcaggaggctgaggcaggagaatcgcttgaacccgggaggtggaagttgcagtgagccaagactgtgccactgcactctggcctgggcgacagagcgagactccgtctcaagaaaaaaaattagaaagtaaataaaaccttggtttctttatctgtacaatgaggctaatgattcttacttgcagaattgttgtaaggattaaacaaaaataatgcacccagcatatcgaaaatacctgatacaatatggactacatggtagctgattgttattattatcattcccagatataatatgattgaaccagaggcattttgtatgcacatattaaaggctcctaatgtgtattactaaactgctttccagaaaacagttaaacaaagccctaagaacactgctaggaagacctgtctaaaatgcagacctgatcatgcctccctgttgttttcagtgtcaatcttaaacacacaggaccactactacttctttggagtcatctccctcttctcctaccacgttcacttccttccaaagtatttcctgttctctcagcttttttgtgcctcagcatcttcaaatatatagctcagtcatctggcatgccctttctgtttgtctgtgctaagtcttaccagtatttaatatctcactctattccagctaatataacaaaataccatagactggatggcctataaacaatagacatttatttctcccagttctggaggctggaagtctgagatcaggtgccagcatggttgggttctggtgagggccctcttctgagttgcagattgcaacttctcacagtgttctcacatggtaagaaagatgggaagttggccgggcgcagtggctcaagcctataattgcagcactttgggagaccaaggtgggtggatcacaaggtcaagagatggagaccatcctggccaacatggtgaaaccccgtctctactaaaaatacaaaaattagctgggcatagtgatgcgtgcctgtaatcccagctactcgggaggctgaggcaggagaatcgcttgaacccaggaggcggaggttgcagtgagccaagattgtgccactgcactccagcctggcgacagagcgaggctccaccgcaaaaaaaaaaaaaagaaagaaagaaagaaagaaagatgggacgtttactaggtcctcttttattagggcactaatcccattagagtcctcaaaggccccatttcctactatcatccacttgggaggttaagtttcaacataatgagttttaaagtgacacagttattcagtccgtagcattccaagcctgatttccccaactcatgtccttctcacatgcaaaatacactcgttccattccaacagcctcaaaagtctcaactcgttctagcataaactcaaaggcagaaagtccaaaatctcatgtaaatatcatgtaaattagatatggttgagactcggtattattcattctaagacaaattcctcaccagctgtgaacctgtgaaatcaaacaagttaggtgcttccaaaaacaatgatgggacaggggcacgacagatgttccatctctaaagggataggctgagaatgttccaagtctttaagttctctgcctttgactcgcaatttcatcttaagtcatagtcctcctctcaaattttactttaagcagtcgagagaaactaggccactcctttaaactttgcttagatatttcctcagtcaaatatccaatttcatcacttgcaggttctaccttctacaaaacactgatgtgagcacaacttagccaagttctttgccactttataacaagactggcctttcctctagtgtctaataacatgttcttcattttcatccgagacctcatcagaatggcttttatcatccatattcccaccagtgtactgttcaggatgacttacatcttctttaagattgaggccttctctacagctcttctcttcttctgagccctcaccagaaccacctttaaaagtcaggtcatggcaatgtaggctttttctagcatgtacctcaaaattctttcagcctctgtctattacccattccacagccacatccacatttttaggtatttattacagtggcacttggtaacaaattcagtattagttagagtttaacatacaagatgctatactgaggtggaataaaaggccatccaaagggctaaattttgacattttctccaaaccatagtctttcttgtatgaatcactatgagtttggatagcatattattatcatggattttagtggctggttgaaaatgagaggaaaacaaagacaacaatgaatctagcctgcagagataaccccacttggtatcttagccaacagttcccaattatttccccatcaaacccctagtcttcattccctctgccttccctattctcatcctgtctcaaccccatctgtcaagaggctagcagaaccatagtatcatagaaaggttcaggcatcaaaaataaagttcaagtgtgaactttgccaccctgtgaccttgggaagttggccatttttttttttaaagtggggataacagtttcctccctgcctatctgtattaggtcattcttgcattgctataaagaaatactcgagactgggtaatttaagaagaaaagaagtttaattggcttatggttctgcaagctatgcaagcatggtgcgaacatctgcttggttactggggaagccccagggagctcttactcatggcagaaggtgaagcaggagcttgcatgtcagatggcaaagcaggagcaacagagagagacacagttgggggtgaggtaccacacacttttaaatgaccagatatcatgagaactcactcactatggtaagtacagcaccaagccatgagggatagtgctaagccattcatgaggattcacccccataatccaatcacctcccaccaggcccacctccaaaactagggattacaattcaacatgagatttgggcagtgacaaatatccaaactattactatattactatcccatgggaagtggctgaaatgagacagcagatgtgaaagtgaacagtgatgctgtacaccaaagtaaacacaccctcctcattgccaagggaggctggacagcagggaaatcaggattggacaggctccacagtggaactggctctgtgagtgaccagtggctgaggagcagctctttgcagagaggggctagcagaccctctctggaggcttccagaccctcgtgcccacatgtaaaagagctgggcaaagtgacaaaaccccctctcccagaggcctcccttaaatgaacttaagtgatactccaacaaggtggaatagaccctccatcatctagtatttttaaaactgtcctcaagaaggctgacgaattgtttctcaaatctaagggcccactgctgatcctcatgaatattaaaaaacagctacaatagtgctaacaaggcagggcctgaagttggggtctggggtgggggcagatctagtactctgcaacctgtcgccttttgttcgctcactcaccttgcagctcccggctcctcggaggacctgcaactcttcacacctggagggtactttggccactggtgacttgaattccacctaggaaacacacaagagatgaatcacaccttattttccactgagggttacaacagaagtggctttatagcaattttggaaaaacttgggaggaaacattgctcctaccgcattgcagtgttctggaagaaaacaggcctaattcatcctcttccaggttttggagaagaggagggaagatgaaggaatagcgatgataagtctgcttagtgaccctgaatccagagattatgtccagcctgatgggagcaggcccttgtgcatgagaagggggtagcctcagggttaattggacactgcccccctgcccccagcagagctccagctctcagcaagtgctcttgaaattctttccacccaatccacagacgctgtctacaccacaggagctcacctttgaagatagcgatgtaagcattgtggcaagaatcactgccttccctgagaaggaaatgcagtaggatgtacaagaaagcctaggggctacataaggagggaaagctgaaaaacgatggaggagggacaggcttagggacagggagaggatgggcttccttgcacaggacagtttgggagtgttacgactgaacctggagagcaattttacagaatgctttggccacatgctgcgtagcatggtctgagagcatgcttgaaatgactgaagggagcagtagtgattacaaaaaggggattgggattatctattgtataatgccaaagctcaaaccacagctagacctgaagtccagatgtatatcaccaaggaggctggcctctgtgcctctcatatgcacaattcatgggaggcaaatattcatcagctgtttcctgttctatatgaggtaacacagcgctcatgttcattcatttgttcaatgaatattcactctgtgcaggcactttttttaggtgccaaaggcagcaacaggcaaatccagcaaggtattgtccttgtggagcttatattccagtgggcagagacaaataaaaatacacagaccaaataagcacttttagataatgaaaagtgctggagcaagataaccccctctctaagccacctgttggcacccctgtcccctgctccactggcattgctaccaggatgctggaagcaaacaaatggggagacttcactctctggtgttttcccaggcagcagccctcagcaaagccagtgcagtgggaaaacaggagaggaaagctgccctgtcttgcccccactgctgacacctgagaaactcacttagaaaaaaattgtttagactataaataagatatgaacagtgttatttctagatggtaaccttaagagatgatttttattttcttctgaattttctgatatttttattactacaatgcattattttgcaataaggagagaaaaatattttttaatgagaagattggcctacctacattaaattaataagaaatacatttggacaaatagacaggggccagatcttagggtgatgaacaacatcttaccatatcactttatggtttacaaagcaatttcacaaaaacatctccttcaacccttataaggctttctcgaggttacatagaaaatgcagtagaatgcctgaccctcaggtccctgacttctaggccaatgtattttccattattccactgcccatctgtagcagaccttacttctctttacagctgagggattcagaaagccactgagccccagatctgaactctcttgtcccaaaccttgccatctcctagagtgaccatgctaattaattcatgcatttattgatctagtctttacagaccccctaccaggttccaggcactgggtgcatgggatatggcgaagaagcaaataggtctcccagtgggttgggggaaaggctttaacaaatgagtgaatatatgatataaatcatggtaactgcagtacaaggaaagtaaagagtattctgtgagtggctagtatgagagggagctaatttggacggtggcactagcccttcactcaatatcccagcaatatgctgtcactgagtacaaccaaggtaagtaagacagctattctaagatggaggctgagattacaagagaccaacctgagtctcaaagggtgtatgttttggatgcctagagagcttgcaaagccacatgaaaagttagttaagaacatcacacgtacttataataatgaaacagctcccttaaacccagcctgaaacaaggtacagtttaccaaccagataggtcatcagagatgtcccaagtccacatatgattgtcactgggagaggtcactgaaggccaggaatgtgaaagtaaaggttaaaccagacaacaatatgtagctaacaataaaaggggacttcaaaaagttcataaaaatggaattaaaagatgaaaattacaaatataaacttgatttcccaacataagttccatcatgtttgatacacttttttaagcaatgacaacagccatatagtccatccctaaagaaatgagggtcctgggaacttaatcatgtcaatgcagtcttttttgcattattaactgaagaaaaatgagtgccctttaaagatttaagattagaaaacaaaaagaagtcagaaggagcaaaatcagaactgtacagtggatgcctgatgatttcccaccaaacctctcttgaaattgcccttgtctgaagagaagaaggagcgggagcatcatcctggtggaggactctctggtgacactctcccaggctttttttttttttctttttaggtgtttttcttctaatgctttggctttctcataataaatgctctcataataagcagatgttattgttctttggctcttcagaaagtcaacaagcaaaatgccttgagcattccaaaagaccattgccatgacctctgctcttgactggtccacatttgctttaactgggccacttccacctcttggtttgattgtgctttgttttcaggatcatactgaaaaagccctgtttcatcccctgttacagttcttcaaagaagtccttcagggtcttgatcccacttgtttgaaagttccattgaaagctctgctcttgtctgcagctgatctgggcacaagggttttgtcaaacactgagtggaaagtttgctcagttttaatgtttcagtcaatattatgtaagctaaaccagttgagatgtctatggtgttggccatcgttagttctgttaaacactggtcctttttagttagggcacaaacaagatgtatcttttccttgcaaattgatgtggatggtctgctgctatgggcttcatcttcaataccatctcatcccttcttaaaatgagctgtccatttgtaaatgctgatttttggggggcattgtccccatgaacttcttgtaaagcatcaataatttcacaattctcctgcccaagcttctctacaaatttgttgtttgtttttgcttcaattttagcagaatttgtgttgctttgataggggctcttttcaaactgatgtcttttccttcttagtgactcaaactagatcctgttcagatgttataccaagttagtatgagtttattttggtgctaaaacaattttgaaattcttgtattttttttaataatatgcattttccatgaacttttggaagacgctttgtacaagccaggacacttcagtgtctaagtggatggcacaggcattcgataccacaggactttagatggggagaggacaggagctgacatgtcaggaaaggcttctgtggagcgagtgggatttaaactgggcttagagagtgaatagggtttggatgctcttcaggataatcccatttagcaaggtcacgagaaatgcccaggaaacccgcagcagtcgatgggccttctcttccagatgctagaggctggcttcctggcctctagcctatcctgggacttcagagtgaggctgtaccccctccatcatgtctgctggtttctaagtgtctctctaacaatgctctgaagagccaggagtgctgctggccaccaaagctgaacatgaagactgatttcagcactgggcaagccggcaaatgcttgcatatatccatacgcacaactcaaatacttccaagtgctgggacccagtggccacaaaacattcaagtcaggttatgttctcagctgccacttgatattgcaggcctaccactgcgatccgggctagggtaagctccctggacacaccaccgactgaacgataacaacagcaataaccataaaatgatgagagcacacttttatatggtgcttcagagtacacaaaggattttgtcatttatgcctctcatttatgagtcactatcttatttgtaatacacctacattattatacggctttcaaagattacgctatcttatttgtaataagaacatgccagcagttatggatcctggttgacagctgtggagggctgggcctggggatgccagatgtctcccatatactcctccatgtgacacttagtcatcttcaatgacaccttcatctccaaagcattccaactcggtggtgtggcctttgaatggatgaagagagccttagatgaggctcaggatcctgtgctcagttcccatgtgaccctagatggatctcactctgtcttaagaacactaggctttggttttagacagccctgggttcaagtcccagctctgccacttcctacctgtgatcctcaggaagttatttatcttctctgagccaatttctcctgtgttaaacatggatgataacagcacctctcataaagtttttgtgaagatgataagatacacagcacacagaaagtgcttagcacagggtatgacccatacttagtgctttaagtgctaattatattattactattatcatcatagggaagatagtacagtgttgttccctcgcctgaacccacagactaggtcaggacccaggggcgtgggcatccttcctctttttgcatgagctcagcatgctccagtgggtggaaccgagggccctgggtgaagacacctttgtggagcaggcagcattctctctcaagcagccgggcttgcagggatgctcttctcccagtttccatgccttggggggatggcagagtcttgatcccaagccatagacctgtactgtccaatacagtagccacaagccacatatgaaggtgagcacttgaactgtggacagtctaaagtgagatgtaagagcaaaagagatttcaaagactgagttcaaaagaaaggaatgtaaaagatctcgttaataatttttagagtgactgcatgctgaaatgattatatgttgcatgtattaggttaaacaaaatgttattacaatgaatttcatctgtttcttttacttttttaaaacaatgtggccaaaatggaaaattatacaagtggctcatgttgcatttctgatgtgcagcgctggtctggagtgtaagctccatgaaggcaggtgtctctttggttcacagctgtatccctggcatccagaaaagcacctgaatggatgagtgagccagtgagtgtgtgaggctggaggagagtttacaagaagctggaggtcctacttgagcagacaggaacaactcctggactccttgagttagggttgaaagtaggaataacacaggctcctttccaaaaacttcagggtggggagactgggaccaggtcaggaggggaatttgctcaggaggccacaggttaaagcaaagtagagcacccaagagagaatgttttgggggagttaacacagcagatgttatgattaacacagcctcggttatgtgcagatgaggaaatggaggctggattccaaccaagcacatctcaaacccatgctctttctactgaatcccttacctcccacaggcaatgtagaggtgcagaaagaaaaccagacttgggattttttttaaaaaaagcatattcccccatgtcaccgctgatgtcctaacctcaggaaagtcacttggcctccttgggcctcgggctcctcttgtcctcctccatagtaggtaaatcaccagatcctgtccatttcatttctttctaatggtgtgcagagataggaaatcctatcccggaatgtagtctcaaaggctgagccctgcatagttcccctcctttcatgctccaaaagaggctctctgactgaggtttctttgcatcacccaaatcaatgatttgtttaagggttctctttgatttaacttggttttagatgcttttcatcagaagccaaaaccgtgcagactctttccttgatctggtaatgaaattccctctgagatatttaatactagaaacagcctctgctataccatattctttcaagaaaaaagacatctaaataacaaaaatcctgccatatccaaataaaaatctcagattgtgaatggacttatctctcttatatctgctttcattgtcctgctgccatccacaccaatgaatttcctacattttttataaaaatggaaggtggccaggtacagtggctcacgcctataatcccagcactttgggaggctgaggcaggtgggtcaactgaggtcaggagttcaagaccagcctggccaacatggtgaaaccccatctctactaaaaacacaaaaaattagctgggcgtggtggcgggcgcctgtaatcccagttactgaagaagctgaggcaggagaatcgcttgaacccaggaggcagaagttgcagtgagctgagatcgtgccattgcaatgcagtctaggcaagaatagcgaaactctatctcaagaaagaaagaaagaaaaagaaaagaaagaaagaaagagagagagagaaaggaagggagggcgggagggagggggagggagggagggagagagaagaagaaagaaaaagaaagaaagaaagaaagaaagaaagagggaaggaaagaaagaaagagagagagaaagaaagaaagaaaaagaaagaaagaaggaaagaaagagagacagaaagaaaagaaagaaagaaagaaaaaggaaagaaagagagagagaaacgaaggaagggggagggggggagggacggagtgagagagaggaagaaagaaagaaagaaagaaagaaagaaagaaagaaagaaagaaagaaagcaaaagaaaaaaagaaacaaataaaaatggagggtacttaatacaccgccaggctcttgtgcctgccacaggtctcgacgggatcctgatgctctaacgttttctactgtgttaatccctcacaacattctctctcgtgtgctctgctttgcattgacctgtggcgtgctgagtgaattctcctcctgacctggtcccagcctccctaccccgagctttttggaagagagcctgtgttattcccacttccaatcctcgctcaagagcctcttacattttaatctaaccagagtattttagagccaaaactgacttcttagagaagaaaatctcacccactcccacccaggtgaaacgccaacattatttttgatcagaagggataaagaaagatttgccagtatcaactgtgtcattctaaagcaagacaaagtcgaatcatggtgggcagagctgctttccaacacaaccccatgcaggatgcagaactcactttattacccgcctgtggctcagccacttgttgaattattatggatttttagtctcttccctcacccactcagcagagtggttgactggccagcactttctagtgctcatgagaatgcctgagttttaaataagcagcacgcaccagcacagcaaagctgctttctcaacaatgattacatgcagaattccaaagccaaacaaattcacctagcggctctattcagctaacatttacagagtgactcctagtaaaagatgctgtgttaggaacggggtaaaaagcaagtgaggccagccatgatgactcacacctgtaatcccagcactttgggaggctgaggcaagagggtcgcttgagcccaggaatttgagaccagcctgggcaacatagcaagaccccgtctctacaaaaaaaaaaaagaaagaaagaaaagaaagaaagaaggaaagaaagaaaaagagagagagagcaaaagaaaaaactagccaagtgcagtggtacatgcctgtagtcctagctacttgggaggctctcttgaacctaggagtttgaggttgcagtaagtgagccatgatcacaccactgtactccagtctgggcaacagagtctcaatcatgtctcaaaaaaaaaaaaaaaaagtgagtgaaacgttattcttctcctcaaatagcttatagtctagtggagataaatgcatgtgaaaaactaaaatgtaaggcagaatgagaaaagggcaataagaaaagacatgtacactgaaaaaagactagaaggaaatgtaccacaatatcaatggtggttatcttgtttattgggtttatgggtgatttttatgatgttctttagtatttcctatattctctgtgtttatgttaacccccagggctgtggggaggggaagggagatggaagacgtccagcacgtgtttggaaaaatgtgagtagggaacagggtgcactggcacaaggacagagtaagagataggacaggagggctagaaagccttgaatgtcatgccaaattgactcagttgctcactgtcagtgtttcaatggccttttgtgattgttgctgatgcatcacccatcacactggattagacttgtgtacatgtctacccccatacatttttagctccctgaagtcagggatcatggcttattcattctgtaaccatactacccagcacaatgactagcacataacaggagtcaacaaaatcttcttggatgtgttggattctaacagggttattccttattttgcaggttataaggagtcatcaagggttccaggacctgacatattttagggagttcatatggaatatataccaggcactatgctgggagccttaattgtcttaattgaccctacctataaccctcattgtccacattcatttacacatgaggttcagaaagtttaggtaacccacctaaggtcatacagtctgaagacagtgtgggtgctaaagtcaaacagaaagaagtaaggagactagacccatgagaggccgtggggacctggaatggcacagccactcgagaacgaagtgtggagcgaggctggcatctgggaggccgtatggaggtagcacttacagctgaggggtgatgaactccgtggctcctgcatcaggcacatttatcatttctgatgtcagcacaggacacacagtaccaacagggactcatccttgccttattagaatagctaccagaagtaggatttgtgcaaacagcccctaaccatgctgtgaatagtccccctccactctctcatccactggctttttcatgaaattcctagacccagacactttcatgaaaatgttgatacaactggctctgactacaaatgtaaatcaatttccctagcctaaacaaaaacagaattgggaatcagaaatgctttctcatcccatctcagtcactgactaaataggtactcttcatctatttccttaccctctctgagcctcagtttccttatctgtggattgattgggctggacaagatgatctttaagatccttcagactacatccaaaactgtatgttctcaggaactttgtactcctccttagcatttatgaccattgtaactaaacaattcctggtgtaactagtgaacatctattactcctgctggactgcgagctccttgagcccggggactatctgtcttgttcccagtaatacttgcagccttgactagagtgctgagcatggagtagcatgccatgtctgcagcacagacacatggctgctccctttctctgggttggagctatgtgtggaccgcaaccagccttaggccttctcaccatgatagggcttctctaatggtgcttgctctctggaggacactgtttctctccatggttcaggtggccagttagtgtcagatttatccacccttccagccaaccctggaaaactcttttggattttctaataaataagaggaggtcagtggtggggggtttggaaactgtgtgtgtttgcattcaaaataccctactgctcaactggaaacgttttcacacgtctctgactcagtggcacagagagatgcctagggatgcccctaggtgtccctaggggcagctcagtgccccagtgagacttagcaactccagccatggtcctccatcctgctccctaacctcagccccacatctcacgttaagaggccaggcctttctctctcaagcccatagtaggcaaggatgctggggttcttgtaggcaggaggatgcctggaatgacctccaccagggcctcttatccaggggatcccaaagctgctccttggagccaacagctgcattttggcctgtgcttaccattctgcagtctctctctcaacattaaatcagtagccactgacattacagtgtcagtcatatgacggtgtccatagaaggaagagatctccttcctttaaagatgtttatttccagaaaatgaaatgaaggcactcctatgcccttccttcgtttctaggacaatgggtaacgtcaaatccccaatagagctggcaatcaaagactaagaataatcatgcatcagttgttcccatctgtttcctcctgtctccttccaatccaggcccccagcacccggccctagtgctcagtgcatcacagtccctagattcttcttgtcaggcggcgtttaattgcttttctctacccttaaggccgtattatactcagggtgagctctctgctcccagagtattggccctttctgagttcactgttcaaaacaacacctgggaaatgcacgcacaagatccagaaatgagattggtgtgttcttgcacaagccctctcacaccctctaggctcctgctgagccagccagagaagtcagcgaggactctgctttcatgggcattgttaatgaaagtttcacttgcttaagtttgcagaaagtagggcatggatctgcgcttcatcatgcagtgccccgcgagacgcctccccaagatagctggctggttattaactaagcacagctggcattgtgtgtgctctgaggctggctgctctcattccagcttggtggtctaagcataggagaaaatggtcccttaggagaagcttgtcagaagtgatgtgacttagtttagatatctgcaggtaggactgacttctaagacattggcagggccatccaatgatgtcagcaatatcacccagaccgtctggggctgcaaaacaaatagctttgctgggattcataaagccaccatcgtaaagtggaactgctggtgttggggaggggtggagtgcaccctggagggagtgacccttacattgatggacaacagaacactaagtgttcagacatccgacctcacccttcactggttcccactgctatggaatggagtgtgaactcgcttcctgggctgcttgggctcttttggtctaaggaggcgcagcaagcactattttccaaaataggacaggagagaatggagaagaagaatggagaggaattcatctttcctagaaaaaggaaatattctctggttggttctccacagaatcagtgcccgctccccctggacagtcgctgtcctataatagtggtcctgcctcccattttccctccagccaggcctccctgctttcactcactttgcttccatatgagaaaggctctcccacatctcttccatctcaccaaatctcctccacccgttaggcagggttttaatctataagggttgccaatgaattatcaaaaaccaggtgtcttaaaacaacagatttcttctctcacagttctggaggccagaagtcctaaatcaaggtgactgcggcgctgtgtcccctctaaaggctcctgcagagaatctgctccttgcttcttccggctctggtacctccaggtgttccttggcttgaggctatatcactccagctctgcctctgtcctcatttggccttcttctctctatgtccctcctctgtgtgtctctttatgaagacacttgccactgaattcagggcccacccagataacccaggatgatctcatctaaagatccctcacttcattacatctgcaaagactcttttttccaaataaggtcatattcaccagttctggcagttaggacatgggcctatctttttaccattcgcccctctgcaggcactgattctcaaccctcagagtacatcagatcctctggggagatttttaaacactccagatgcgtgggcctcactccagaaatttgttttcacatgatcctggatgggaaattaaataagtattttcttttcttcaattccccagtttctcaagcgcagccaggatggtggggcaggggcaaggagcaccacatctcccggacagtacttcattgaagaagacattgtaaagaatcccagctttcactgatcactttctcctccaggatttttttttttctgactgagtcatgaatcaggctgtcatccattgttttgtaaatgttgcacaaagaatgtcagagaccttggagatcatttaacccagtggtgctccaccctatccaatcaatgccctatttttgtaacaaatatttagaaacaccatctttaccacctgaaatacaattcctagaaaagtcggtcgacccaaacgcataaagtagccctaattttaataaaaggataaaaaggaaatgtgattaatatatataaatacatactatatgtatattttatatatatacgtatatacacagagagagagagagcgagcacacacttggcatgtcatcttgtgcaggagccatgctaatcttctttgtatcattccaattttagtatacgtgctgccaaagtgagcacagaaatgtgattcttaataaaataatatgtctgtcaatatgtacgtgctcatgcatgcctgcactggaacacataatgaagtagtcaacacttccacctacctataatggttaagtttagatttaacagaagacaaatagaagccacttcatataagaagtacaaggaaataaaagatcagagggatataggaggacaatagaataaagaagtgttacaatgagttacccccctttcctggccgtatatgataacaggaagaaggaaataaccttcactgaggtacagataacaagccaaatcaaattacaaatgtgcaagcagaggaaacaaggaagcacaggatcctgtctcgtgagctcagtcttacgtataagtgtagcgtcatgataatttattacgctgtgatatggggcaggatagtgacaaagtgtcacagaaaacatgtttccagtctggaaatcccacccactgtgttgaggcatatattcggtctttagcagtaaagaaaaaaaaaagaaagaaaagaaagaaagaaaaaaaaaagtggctgggcgtggtggctcacacttgcaatcccagcactttgggaggccaatgcgggtggatcacaaggtcaagagattgagaccatcctggccaacatggtgaaaccccgtctctactaaaaatacaaaaattagccgggcgtggtggcacaccctgtagtcccagctactcgggaggctaaggtgggagaattccttgaacccgggaggcagaggttgcagtgacctgagatcgcaccactgcactccagcctggcaacagagtgagactctgtctcaaaaaaaaaaaaaaaaaaaagcttttaaaatgacatccttatagtatgggcggtgagaagaagaggatggattgggaaaagttgttgggtaaatcttgaaggagaatatcagagtaagaaggaagaacaaaaggcaaccccaaagaagtaaccatgatagctaatttttgcaagagatttcttatcattgtactacaaatataaatatatgtgataagaatattatttttaaaacagcttttataaacaagtttgaggcgcctctgctaatttaaactagtatctaattctacatcggctggatgaagtctcagatttcctgttacagacctgcgcatgggttccttgctttgcggtcactgcatattgtactgtgcccttttcagttcagtgtatatttggaaatgctctgatctagacagaatgcatgaagcagggagatcatctcgtcatttcgaggttttgtctttattccatttaggcttctcttcctaaaacaaccatttcctaaataccgggcttttggcttaacttctttgaaagtgtgagaggcattactctaggggacagcctgaccccattagaaacactcgccaaacaagggctgaaaaactacctattgcatactatgttcgttatttgggtgatgggttaattagaaccccaaacctcggcattatgcaatatctccatgtaacagacttgcaggtgtacctcctgaatctaaaaaaaaaataaaataaaataaggaatactgatcaagtgtaacctcattcatttctgtaatgaggaaacaggcccaagagggtaggccaactgtaaattttgctctccttcctgtcactaagttccttgagggcaaggagggtatgggatacttcttttgtatctgcacacagctgccagcacagagcagcacacatacctgtctgtggccctagacgtgcctgctgtctgtattccatcaggactctggagtctccttttcaacctgaaaaccactcgtttctaattactcatccataggaaacacaggcaacggatccccagaagtcacttgggactgagtttcaacacttttgtttcacacagtttcagcactcacaccagctgcagctgaagaccatagcacttcaatgaaaagcaactgactccctccccaacccctctgcccgtaggctgctgtggttagcactgcactcagagaaagaataaataaaaagcaaaagccccagttgttctaagataaccacagagatgacagatgctgttgcatgcaaacttgcgggagaagagagataaacagcacattacaaatccaacaaagcatggtgacgagaagccttggcgggcaagtcccgttgctgaggtgtgacttcagagatcaagtggaatgtgccctcttggtcccatcctcccctcacccctgcactcttcctctttcagctggctgggtttagaatttcttcagtagggaagaggattttgccccgctggaagaatgctaactctcaggatgagtgatactttgggagacccccagcccccagcttacaggataaacaaatggccaggaatgagaaaagctgaggtggagcagcaaagggagggagggttcctttggcccacctttcaaccccgagtggcctccagagagctgccagttgtggtcatgttcatcctgggctgcgggcagaaggatggctcaataccttagctcatagccaccacttctgggtcccacttccttccttcatcaagtagtgtaaaatgacgaggacccaagacagctggaagccactcgccttgttgtccatggttgctccatggcgtatttgtctcttttgtcacattctggacacaacccaacgcatccatgtcaccaataccacatgtagctggtggcactgcagctttctgttgacctgcctgaactagcctccaggcaccaggcttgtcactcacaccgagcgcagtgcctggcattcagaaggtgctcaatacatgttcttggattgaaagagcaaaagggcaggggagccaattccactctatgaaatgggaaaagctgtcaaggaacagccgtcacgttagttatgagaccacagacgcattgtcacccaccttttttgcagtatgtagccatctggcccattttcagagctgctcttatctttgtcacgactatcatctccacagcatcagtaatgacagacttagaaggtgagaggcttaactgtaaaccactccttatttaaaaagactttggggccgggtaagctggctcatgcatgtaattccagcactttgggaggacgaggcaggcaggtcatgaggtcaagagatcaagaccatcctggccaatatagtgaaaccccatctgtactaaaaatacaaaagttagctggatgtggtggtgtgcacctgtagtcgcagctacttgggaggctgaggcagaagaatcacctgaacccgggaggcagaggttgcagtgagccaagattgcatcactgcattccagcctgggtgacagagcgagactctgtctcaagaaaaaacaaaaagactttgggagcagcatgatagattggctaaaatgtcaggttctagtgacagaaaaacctgggttctgatcctagttcttctgtgtgcgagttatgagtcttggtgaagccacttcactctgctactgtttccttgtctggaaaagtgagctagtgctaccactgccttggggggtctgctgagagaatccatgtaatggagcaacacttctgactgtcttgtatttcatttttattgctggtctccatgcaattactcagatagtgcacaaaagcaagaagagagcagagttctttcccttccacttttcagctcccgagatgaaagcctggacatggcaaggcaggggctgcaatctcaagcatacagaagattaacagaaatgggccgagtgggcaggggccgatgaagaagaatcgctttcatattaagtctgccctcctccctctgctggaaaaagacagcctccttggttttcagtttcccccttgaagagacatgagtacatgagtgatttcccttcctccttaatactctatgagagaaacagcacaatgttgctagatggcagtcaacgctcaggctgaacgcaagagggtcagcaagaggtggtggggaagatgccagagcggggcagggaggtctctttaaaaggacagctgctacccaacccaaccagttgtccacatactagaactgagtgtttccagttctgttgattattcaaagatttttcagaatttttaaatgttacacacgttcagggtcaacatgaaatggcaggtttattccgtgcagtgtttcttgtaatattaacagcaaatgactaaaaacaacctgtgttcatcagtaggggattgctaaattatggtaaatccatacaatgggatactatgcccctgtaaaaaaagaatgaggaagctctccacatactgagagggaaagatcaccaagataaatcgagtgaaaaaggcaaggttaaaaatagtgtgtagagtctgttataattatgtaagaagtagagggatgaggcagatatatatttgtactgacttttatctgcaaaaagaaatcctggaaggttgtataggaaactaataaaagtggttacaagggaggggcagggcaggactggccaatggaggcagggataagatttcgccgaatacctttctatagcgctttaatttttgaaccacacaaatgtattgcttatttgaaaaataatacaaaaacactgtatacaccagctactgggaagaaaacacatctacaggctacgaacagcctgcaggcttctgggttgcaccttcacattaagggctccaaaactggagaggcagaaaagttggcagcattggatccaagctttactaggtgtggagacaagtaggttgttcagtatctggtgtctggaactctctctggattgcctggcaatgagctagttgggcccagcagcctccgccacctccagggggaaagtgatgcactcccagcctctctggaagagactgctccaaaactcaacttcccgggaaactgaggagctccagggtcaccaggtgctgggcagacagaatttcctgccattcctcgatagttaaggctgcctggaaccccagtggtgtgttccccccatcaaggctctgtcccacttgtcccatacaaaggagagcgataggtgagtgcagttcctcctctggagcacagcatccaatgtgtccagctgggccccagctcagcacacctctctagtgaatgctgagaacagaggacatgctcccctgctgacactgctgccagtcactttcaggcagcaccatggaacaccattcatattcaccccggccctttgtatgtccctagtcttgtcactgtgaatgagctcacttagtgtggcagcttgaactgtgatctccacattgaagtcctaacccctagtacctcagaatgtgaccttctttggaaacggggttgctgaagatgtaatgagttaagatgaggtcatactggagtagggcggttcctaatatggctggtgtccttataaaaatgggaaaatttggaaacacacacacacagggagaatgccatgtgatgataaaggcagggattggagtgacgcagctgcaagccaaggaagaccacagtcggccggcaaatcgtcagaagccagggcgaggcaaggaggggcctcctatacaccacagaggggtcaggccctgctgataccttggttgcagacctctcgcctctagaactgggagacctgacatttctgttaatcacccagttggtggcactttgttaaggcagccctaggaaactcatacactcagcaacctcaggccaactcgggtggcaaaagtacccgccattgctccttctcagcaggtgcccaacagatactggtgacaacactgctcctatgaatgaagatcccaggacctggcccggtcaagtgtattgtgtcggaatgcatcaaatagtcaaccaataaacaatggctgagtacccgaccttgtgaagaatgcaaaagacataaaatattccattactaccctcaaggagttgacaatctgattgaagattcaagaaagacatgtgtaataatggccaaattagtattatcttcccccagccctcacccacgaccagcagatgccacagaagtcactcttaactaaattgcactgtgctcccagctggattcaaccttctactgcatctcatttcgctgctccctgcatgtgtctggaagaaccgcttttccagctctccaggacattctttaggatgtcaggctactagacaatttctagaagctgtcgccactgctcctggcatggagcccacacttcttgcccactgcggacacccactcctggccagaattgtctgccacccctggtgaagccgctcccatcagtttcttatgagcgcttttgtcccagtcagagaagcagaccctgtgggatgttgagcctattctgcagcaatcaatgaatctgacaagcaaaaaacatgagatccaggtggtttgagagtccactttgctaagctgacagttttcaagccaggggcaggctacagaaaatcagagaccctcaggagaaatgctgttttcttatcctcattcagaacatttgtttgtttggcccagccttctcacaggcggctgctcccagtaccccctgaatccaggaactccgattcttaccatcagcaagactcctgtgcagccacacacctggcaggagaggaggcagcacacctgtgttgaattctcctggcactcctgctgaatcccagcgctctggatccggctcctgcagggtttttcttgtgctaagtgcccagtggaggctctggctgggctcatggaggaagagtggcaagttgctgctgccccacccttgacaaacagcccaatggccccaggtggctccgtgccagcctcctgaagggcagctgtggtcagggcatgacctgtgggtagaacagagagaggaaagggttcctcactttgacttcaagcaattcattttagattatctgggttgggctttgaggcagacactgtggcttgctgaagcagcatccatttatcctttcctcctttctagcagaactccatttctgttcactcaggacagtgacctcctccccagctcagaggcctcatccagccaaaacaatgcaagcttcttgccaatgggtaggttggggtggactctactccgtctctggttgttaagacgtgagaggagccctgctaggggtgctcggagaagtgttttcctggctcttttcctctgctggatgctgtgccatctgatgtgttgactgcaacttctgcagccactttgtgaccatgaggaggaagcctgaggcagaacagaaggactgaatccgggcccttgatgacatcgttgaccactggatcagacaacaccaatgtcacccttcctccagacttcttattacacatgcgataaatatccttgtttaaatccatcgagttgtgggtttttgctactcatagctaagattatctgaggtgatgtgcactgagatgttcctgagaccacaagaccacattctagaatccaatcccactatcctaaccacaacattcccaaattttcaggacacacacacacacacacacacacacacacacacacacacttttctctccaccttttcttggtattcagtccttttcctagactggacacattttgccttatttttttttttttttgagatggagtctcgctctgtcgcccaggctggagtgcagtggcatgatcttggctcactgcaagctctgcctctcgggttcacgccattctcctgcctcagcctcctgagtagctgggactacaggcgcccgccaccacacccggctaattttttttaaaaaatatttttagtagagacggggtttcaccatgttagccaggatggtctctatctcctgacctcgtgatctgcccgcctcagcctcccaaagtgctgggattacaggtatgagccaccccacccggcctgtattttcaataaattctgcaacatatgccaattccatcatttaattaagaaacattttttacccccactgatgtaccagacactttgctgggctcccgggactcaaaactgaagtcagggactaaaccctgaaaatggcatggaagttcctcaaaaaactaaaaatagaactagcatatgatccaacaatcccacttctaggtatatgtccgaaggaaacacgatcagtagctcaaagtcatctccgcactcccgtgttcacagcagcagtattcacaatcaccaagacatggaaacaacctaagtgtccatcaacagacgaatggataaagaaactgtgaggtgtgtgtatgtgtgtgtgtgtgtgtgtgtgtgcatatacataatagaatataatttatccataaaaagaagaaaaccctaccatttgcgacagcaggggtgaacctcgaaccttgagggcattatgctaagtgaggtaagccagacagagaaaggcaaatttatgatgtcacttatatgaggaatccaaaacaattgaactcagagaaacagagggcagaacggtggttgcaaggggctgtaggtggcgagagaggggaaatgttggtccaagggtacaaaattgcagttacaatgtggataagcgggtaagttctagagatctaatgtacagcatgatgacttaatactgtattgtatacttgaaatttgctaagagggtagattttaaatgctcctaccacatacacaaaaatggtaactaggtggggtgatgaatgtattaactaactttataaaaaaaattttctctttgaattctatgttaaccaacttgattgggctatcatttcataatatacacatatatatcaaatcatcaggttgtacaccttaaatttatagaattttatctttcagttacacctcaataaagctggaagaaaatgaagccctgcggagatagagcaagtgagcccaactcctggaaaagaggtgagtgcagggaggcaaatcctaggacagggtgcacgcaagcctgtgtgggcacaaagaagggtgcggggagacctggcgctgggagagtgttagcaaaatgctcctcagaaaagaaatgaattcttgaagggagacaagaaaactgcaagcaatagaggcaggcagacattcacaactgagtaagtaaatagtaataaaataacaaccaacaatggtggcaactaacagttcctgacacaatgacccaggcagtgtttgaaagttttctgggtactaacccatttaatcctcctccaaagcctgtaaggtagttcaaggattagccccattttatggatcagtaaactgaggcatggagaggttaagtgatacaggaagtgggtagcagaggcaggacttggacccaggccgtggagctccgaggctcacatgctttataggctacactggtggttctcacagtggccgtcaggagagaagcccccgcagcccctggaaacttgttaccaattcagatcttgggcctcatctcagacccacagagttagaacctccgcaggtgaggcccagcatgccacgttttcacagcaggccttccttgtgattctgatatttgagaaccctgcttgacactataagcctgtactgagaagggatggcatgctcagaggaccatgaatgctgcaaagagaagcaaaagccagagggcaagacaagtaagctgtgaagaagcccatcaggagggtgggctttactgtatgggcatgagggagaaaggtatggggtgaggcagggaggtggcttgattgggctttgttctctgtgacaagatctctggcatgagtgctagtaatagactagatggggaagaagatggaaggaggggggccaggtaagaggctgatgctatgaccccaacaagtacagcaggggctgcactaaggcggtggcagtgcagagagaggagggatagggacagattcaagagacagagtgtgatgacagctgaacatgggtactgagctggtagaggtatctaggatgactccatgacatctagcttcagaggttaggtagatgggtgacattatttagccagattggaaattctacaggaaggacaagtttggcaaggaagagaattagttccacttggaaatgttaagcttgaggcttccatgggacattggagtggaggcatttaggatgcagtgagagaaagatctggtgtgcaggagtggggacagggctagacatgtaggtgtgggattcgccagttgaaatatatgagggttgaagctgcagacataatgaaggctgctcacagactgtgcagagggagcagaaaaaaactgagggctggaatcatgcaggacactaacatttaagggacactcagaacacgtcagccaaggaggctcagaagcagtgcttagagaggaagcaaaggaaataatgttgtctcaaaacccaaagatgagaaaagatggagaacgtttaacgaactagaggctgacagcaggttcaaatgttgtagacacgtcagacattccagagaagaaaccctggacttatcaatgaggaggccaccggtgaactcagtaatagcagtcccagtggagggatggaagcagaagccagattcattcacagatgcattctccaataagcaacagctatcatgtgccaggctttgtgctttgtgctgggatagggtgatgaactcagcccttaccaagtagtggacaggggagaaagtggacagaaattacaatgattacaggatcacaactggggtaagtgttctgatgaagacatgaagacacacaaagggcttgctatagggagcccaaattaacaagaccaacacagaagatgagagaaaggaaattacatttctgttgggtccacggggtgaataggagcaacccaaggaaaggtgggtgggaagcctgttaaggagggaggacagtgggcataaataccctcaggtagaacacgctttttgtgtgttcaagaaatggaaggaaaccagggtggctagaacaatcctaatgtggaagagagtggtaggagatgaggctgaagagtaggacttgatgggcaggttagagatttgggacattaccccaacaagccagaggaaatcactaaagttaaaatctaaaaggttgggagagacatgatctgatttgcatttttaaaaagatgactttggctgcttgtggggaatgaaattggaagaggagggatatggagtggatacatggaggctggttgggggaatcactacagcccaggcaagagatggcaacatcttggaccagggcaatggcagcagaagtaggtgcaggtaaagagattctagagctatttagaggtggaatcaagaggactgggtggccaatgggatgtagtaagtggggggaaggagcagttgaggccagcatggactctgtggtcccatctacatctattcttggatactcccacaaggccactgggatggaagaacacatatcctttgaattccaaggcatcaagtcctactggcttttgtagggctcagatcagaactagaggacaagtcctaccaagccttcctctcctaaaggagcctctcatcgataaaatgatgtcttctaaataggcctcctgaaaatctcctcaccttgtttggtgacactccttctggtgtcatgtcctgtggggtggggtgccaggctggccaagccccatggcgagtggcttctcatcacaacaccctatgcactctttagggtattcataaagtgcattcagtacatgtgggcaattctaggctcctaatgccaatctccatctgatcagttttccctctcctaattttgtcaattttccaacaacatgctagatttctattttcatcattatggcaggctaagtacctagatggaccttaccactagaaactactaaaaagtcttatataaatttttttttaatttccaaaagcactgatggactgacaagaaaggaaggaattcacgggccaggggcttctttagataatatatatccagatactgaccataaaaatgactgtaatgtattcaaagaaattaaagccaagcttgaagattatgtgcaggagacaaaaagtcatgaggaataaccaagaagttttgaagaatgaaccaaagagaatgtttagaaataaaaaaataaataattgaaatttcaaactgtggatagacttaagagcagattaaatacagtttgagaaacagacagtaaactggaagctgggtcaataataaattaaccaaaatgcagcacaaaaagacaaagacactgaaaatatgaaagagaacttaagagacatgaaaaagagtctaacatacatctgtttggagtttcagaaggagaaggaaaagaatatttaaacaggtaatgactaagaattttctaaagtgatgaaagataccaagacacatattcaagaatcccaagaagaataaataaaaagaaatccataagcagacacatgtcagtgaggctttagaccaccaaagacaaagagagtgtcttaaaagcagcacagagaaaagagaaattaccttcaagggattaacaggttatttctcatcagtgatgaacaagacagaaggcagtggtaaaataccttcaacatgctaaaatcatgtcactgtcttctgagaattctatacttaaaaagatatcctttaagaacaagagaaataaagacattatctgacaaaaaaaaaacctgggagttggccacatggagactctcactgaaaatgaaaattttaaaagatagacatcaaacagaaaaagacagaatctaggtgaaagatctgagattaaggaagaaatgaaaaacaaagaagctgaaaatggattttctcagtgtgttgttgaaaaagttacagattggtagtcagacatgcttatactggtatcttgctgccatctcttgctatctgagaaacttcaatcaaattacttaatctgtcagagtcttgatttcttcatcttaaaaattcatctaacagtgtcacttatatgagcatttttttgaggaataaatgagcaaatacctacgaatgctcccagcatagcttctgtatctggaaggtgtaaagtaaatgttaatttcttatcccttttaaaattaatgaatacattttaaaaataagacattgctaacaacaacgaatgactccctttgcttcagttctaagataaaattctggcactgtttcaaattgtacaaatatgaactcgtgttcagcagttattttcatctttccagtatcaggcctaagatattttgaacaaaatatttatgatctctttatttaagaaatactggctgagcacggtggctcatgcctgtaatcccagcactttgggaggccgaggcgggtggatcatgaagtcaggagattgagaccagcctggtcaacatggtgaaaccccgtttctactaaaaatacaaaaatcagccggacatggtggtgcgtacctgtaatcccagctactcaggaggctgaggcaggagaatcgcttgaaccagggagttggaggttgcagtgagccgagatcacgctacagcactccagcctggcgacagagcgactccgtctcaaaaaaaaaaaaaattattgcatgcatagacacaagccccagggatataccccagattctagatgaactcacaattttaaaataatttgtggtcacagtgttatgaggttataaaatagatgctggtccatccgtactgcaaaacgacatatcctgctcatcctctttcctcacatccttgcccagggctctcctttcaactaggagatccctggagatcaaaaatgatccctctgcagcttctgctaccccaacccccatgctggagagccccccagcttcttccatgaccctactctcagtttgattagggaatgaaaaaggagaggaaagccaaagttaataaaaggtagctaagaaaagttagcttattctttagggtctctgcccaatttttatttggcaacacttccggggaaacagataaagtcagagtgaatctttccttgatggtgtcaaggaaacaaaaagcactggtcctgaagttctaagttctacgtcctggggtggcgtccttactcggcatttgcaacttacatgtccttgggcaagccacttaacccctcttattttatttatgaggcaataattatatcatatttgtagagcattttacaatgtattaagtgcctccacagtcataattttatttaatatgcttggccaagtgtataatactcagtactaataccttactgcattgctgtacacatttgaaagcagagtctgtgggttgctgtgtgaattgcaaacaccttcatcaacagagagatcatctccgtgtacataatttaacccattatggttattgagtgggctctgcagtcaagtgcctggatttgaattctggttttacacttactagccatgtgacctcgagcaagttgcttagctactttataagcctcagtttcctcacctttaagttaaggaaaataataattgtaccagcttgtagtgcagagctttgcatatggtgggctctcagtgagaagtgacttgaatttacaccaagttgagttgacagctgtctgaccacacatatgtcctcaagaacacccaccctccttcttcctttcttctccatggttgcctccaccctctacatccctaggcaaatatttgcaaagggaaggcagaagctccagatagcaggacacacccagaatgactttcttaaaagtaacaaagcctcatttttccattttccactttctgtaggctttagttcccactctatttcaggggggtctccatgctattttggttggaaacatagcccagatttctgagggtcccagtcagcctggaccccttcctacttcctcctgagggtcttgatgtgacaggccggagagctctgggctatggggcaccggctgagcctcaatcacctaactgaattgtgcagttcacctgtttgataaaaaacactgatgactgagccaaggctaaatggatctattataatgatataagaagcaaaggttaatttcagccaaactgatgaatgaatggaaaatactttgctgcacaaaaataagcaacgcccatttaaaaggctttctgttcataaacgactttcatattttcactgtttaattccatccttataaattccctaaggaacatgaagggcagctcttttatagatgaggcaactgaggcccacagagagcaagtggtgaagctgaacataaaacacgctcttcctccctcacacccaatgctgctgcctagcatggcttccccacctgagctttctgactttcctgtctgcccgcttccagcttctgtggaccagttcctaaaggaacagcattaggagtcacatcacatcggcatttgcattcagaatgggacagggcaggaggataggagacatggcttacatcttagtccacaaaaagaaaacacatcctcaagagctccaattaggcccaatcagcctggagttcacaggctaactgcctgcagtaatgaagtgggcacatgtgtcctctcagtgagggcaagagagtcacccatgactgtcactctgctagttaacatttctctccaaagcacctctgagacagcccagccatttcacaggttgcagacaggctgtgtggctgctggggttgaatgcacatctgaggttaggacagggagggctggactaaccaccgttacccaggcctaggacatgggcaaatcatgaacagctgcctttggctctataaccaggactgaaaagaaatcaggcagcaggcatgaaagaattcaatagtgggcctgttggtaaaagacttaccatctgggcattgctcattcggttttggttggcttttcctggtggataactgtataaggagagggtgagtctctgagggtggtcccatcttcttccactctatagctctctggcaccttctacagggttccgaataccatctccatcctaatgggacatagtccacatcatacatgcccaaatctgtggtgattctagagaccttccagagcacatgcagaggcggggccagctgtgctaggttctatttgacaacatccccgtctagacgaaggaggaaggatcaaaaagtccagaattgaatcctggctccctgctgggagaaatctcacttccttctagattatgaactagtcagtgaaggccagcaggaggagagtgtgacccttacaaatattggtaggcacattctacagcctggccagaacgtcactggtttaatttccataagaatgaccctcagacactgtctataagatggacagaaggacactcatggaacagtcctcccaggacctcctgtcaccacttacctgctgaattctaccatctttgaagacaaagctcagttcccacctacttggctaagccctctccaaggcccagtttctttccagagcacattcattctgtcccatctccttggcaaaagttatacatgctatctggggaggtcagctctctctgcgcttgtgtctggtcaaaagaaatactgtgtccctttttctttttcctagtacaaagcacttcatacagtaggtgttcaacaagtacatattaatccattttgttttttgttttattggcactaaatcactacaatgtaacccctaaagtgtcagaaaattcagatgtggtgtgtgttacaatctaactgctattgagtacaaattagaacttttcattctatttcaaacttctgtaaatagggcttgtacattttttaaaaatacgtttagtttgcgatgtgtgactacgtaatggaagctgagtaacttttcttttttcattgacactcattttacctggcagttcctttttgtgtctctggttccacttcaagctgcagttcaatgtactaaaactgcattccttaaaacgaagtactatatcagacttttaaactggccttttccatccctatatctctggatggcctgtgcctggggcagctcacctgatacggcgtcggcggcttctgcctcccattttacaggcgtgtggagagagctctgttatgaagcagaccctgcaacccaaggggtcggccctttgtaggaagccagtcaggcacagggggatcaacagcctgggggaggtgtccacggtgcaggtgtctataccgggactaggtgtctggtgtgaacccacacaagttgttgaacctgtctgagcctcagtttcctcaactgtaaaaaggacatggtaagacctatatcagaaaatgcctggcacatggcaggcatttgacaaattatcttattatgaagcatgcagcccacccagaagtttgttgaatgctttgctgtttccccagctgacttcattcccagagttaagccacatcagaaccctgtgccctaaagaaagttcaacccaaaaatctgagttctgagacacacagtaggggcttgcagtccatggggagggtaatgacgagcaataggaaatgtgccagaggacacgtcgcagaagatgtgtcagatgccagaaagaatgctcgctggggaaatagcaaatacactctgtagtatctgtggccaggacaaccacagcctaggaacaaactgtgtcctgagtaaatgcagaatcaagctgtggtgagataccaagaggggacaggaaagcaaaacagatcatgaccaagaacaggagctgagatggtgaccaaacccctgctagccagagaacgtgcaccaattctctgccttgggaggaatccacggtcaaagctaaactcacactttcatagtatgtgtgtaattagttgaaaagcttaatttaacagtttggtaaattccattagcagtttatctgtggtatgtaatgaagctatttttaagtgaatcctttttggctaaaggccccagtgaagaatcctaatggaacatggttcacataatacaaacccagatccgtgcagatgctagaaaccttctcgagtagacactaatgtgcccagacagggaagctgtgcttgactctgtacaatgacacccctgtctagatgaagcaggaagaatcagagagtccagaatcaagtcccagctctgaaattacactgcctcgggtatgttacttacatctgtggtgctcactttcctcatctggaaagggtgggtgatcatactaccttacaggaccctggggagaaatatgcaaggttctgtacaaagtacttagcccacaggagggcagtctcacagaagtgcttttgattgaagcagataattttttttttaaacccaaacaaacagaaaggaataagagagaaatggcagcagaaagattacccaagtcgacaggacatctgatggtgaggccattgtgcagagagcgaactgagacggtatcactgtatgacttcctggagccacagttaaaaccaaaccttctccaaccccatcagtttgagaagaggaaacaattcacaatgtgaatatacttactgccactgcgcagtatacttaaaatggttaaaatgatacattttatgttatgtatattttatcacaatgaaacagtgaagatccaaaaacaaacaaacaaaaaaccctaaacctcaactctctgcccactgaagacagtccaataaaaataacataaagaagagttggatggccttccctctgtgggattctgtagggaaggctgtgtccatgcacccagatgccacaccaaaggccctgtgagtcaagatctccatcctgtggatgatctgtatccggggtgtctgttcaatccaaactcccagaagacccgaaaaccaaaaagctaccgcaggccatggcaccactgaaagatctagaggttcttctgctgaacaatgtgttatccctgatggtatctccccaatggcaatttctgaccgtgattcagatgacactacccacagaaatgaacttccaagaactcctcctccctcaatcccaccgtgtcctcctctggggatggtggcgctgctgctgtcttgctcacaaaacctgccttgggaagaaagcccctaaaatttcagccctgctcaggttaagaaatagtagctttaggccaggtgcagtggctcacacctgtaatctcagcactttgggaggccaaggcaggcagatcatttgaggtctggagtttgagaccatcctggccaagatggagaaaccccgtctctactaaaaatacaaaaattagccaggcatggtggtgcatgcctgtaatcccagctacttgggaggctgaggcaggagaatcgcttgaacccaggaggtgtaggtaggttgcagtgagccaagatcatgccattgcgctccagcctgggcaacaagaacaaaacttcgtctcaaaaaataaaataaaataaaataaaataaaataaaataaaataaaataaagaaagaaaagagaagagaaaagaaaaaagaaatagtatctttgacaaaccatctccttccctacagaaaaacaaaacctggctgaaggcaggaggtgtctctctggccagtgtctctcatctccctcccgctgacctccctgaccccattcatgtcttcagaagggcatggccctgtcgagggggtgaagggctgttcctgtgcctcagggccctgtgctgtaaatgcttcccagcctgggctgtacttctaggtgcagctcaaatcctacctcctctctaaagccatgagaaatatactttacttacttgcctataaacactaacatcattggttatttttcatatcatctcctgctatgagctaaattatgtccccccgacaattcatatgttgaagccctaactctcaatgtgatggtatttggaggtgaggactttaggaggtgattaggtttagatgaggtcatgagggtggggccctcatgatgggattagtgcccatcatgaagagacaccagagagctctctctctctctctctctccccatctctctctcctccctcttccccacccttcctccaccctccctctcccttcttcctctcccattctctccctctctgtgccatgtgaggacacaaaaagaaagtggctttctgcaagccaaggagagaaccttcacccaccaaactggcaccatgatgttagacttccagcctccagaactgtgagaaaataaatttcggttgtctgtgatattttgttctgtctgccagaacaaagacatcccctcaaagggagtatgcatgcctactacagggaccacccctctcttcttagaccagaccccctgcaggaccctttgctggcacagcagggacttagcatgcatggaagctaattaggtgagagactctgcttctgcctcctggagaatttcaatccaagacaagcacaacaagttgtgaaggaccaacaaggggaggagtacatctcaacaagttggttgagaaggaccaacaaggggaggagtacacccttagcatggaactcaaccacaagctctcaaaacaggtaatgtcaccatgacccatgggatcacatgtgcgtggaccacgtgcttcctcacatcccttaactcacctgacatggatcaacaggtaactcctgtattctcacttgaatgaagagaagagaaactcaggtttagaggctaatcccaaagacatatgactggttagagtagaacccagactctgcactaagcattcagaggcggcaggctgtggaacgcttgaggacttggccctagagccagactgcctgggttcaaatcccagctcggcctcttatcagctgtgtgaccctggaaaagttactcagcctcttgaaacagatgaggaagatggcttcctcatctgtaaaatggggaggatgatcataacagtgcctatttcataaaacggttacaaagatgagttcatttatgccaaactctcagccatgcccagtgtgtttctgtgcatcaaccttgaggtgcagtggaaagagagtccctggagttccgtctttggtcaaggtggggctgcaggaagctggcctccctcccgcatcagcaccaatccaaccctctatcccagtgggtgaaggtatgtggttatgtgcagcggacaatgtggcaaagctgcatccatttaccaagagaactctgatggactacaaatcctggacctcaatgctgagcaatctctaaagtaaacaaagtgaaaataaaccaatcacccaggtaatagaagattttcctcttgtctgcactggtaattgggtcatggtagccaacctcccacgtcccctggtgctgctgtgagtttaaaagagagtaaaggaagctgtctggccagaaacacgagtgcaggttccgggaggagggcagccacacccgctggttccagcttgtcctggtgcacctgtagcacgtgtgctacgtctcacccttctcacctttcctctaactaagcccagaagggcacagagctccacaggctcaggggtgcacccagaagggcacagagttccacaggctcaggggtacacccagaagggcacagagctccacaggctcaggggtgcacccagaagggcacagagttccacaggctcaggggtacacccagaagggcacagagttccacaggctcaggggtgcacccagaagggcacagagttccacaggctcaggggtacactacgagcacaggactgggtgttaagcctatccaacctcactgctgggacttgcttgggtaaaacacggtttccactttcccacaagttctcaggcccagcctcacatttttccacccccaggcagggcagctctattgtgtgaataagggatcttcagcacagatggggtggggacagaggcccttggaatctgaaccacaggggaagcttgcctgctcctacctccatgcatcttctagaaacacctggagcatcacccagagtcagactccacccaccatagagcctgctgccccataaatgcctcccttggccagccccatccaggatgtgtcaacaaacagacaagggaagaaagtgtcccgctggcattccgagaaagccagggctgggagccaaaacacaccgacaagggggatgctctgtctcctgaagaatctgtcacaaaagaaaattctatagccctcaagctggaagaggccctggagataactttgtcatcacagggtggcaccctctagttgccccaggcagatgaggtcctagaggaacccgtccctaatattgaacttcaagaggtccttcctgtatctaactcagccttcagagaaagggcagagcagttacaaggcaaggatgactgagaactccaacacctgaggccaagactcagcactgtgtacaaggtgtggagcctgtagaggacaaacctgactgagggttgtcctccccctcacctcagcctgactgcaaatttgtttatgtcatccggatgacgtcatgctaacttgaccagttggagcagctgtgagggaaaacagaccccaaaggtccctctcctgagtcctgtgaggggaagggggtgtctttgtgtggatgctgttggtgagtagagagccaatggagcataacgcttacagtgcaggctctgaaatagccaagctgcctgagttcaaatcctgcctctaccgtgtatcggctgtgtgaccatagacatgatactgtgcctctctcttcctcagttaacttttctataaaatgggcatgatggcagtgcctagccaattgggttgtagtgaggcttccataagggaatacatggacagcccttgggccatgcctggcactttctttgcattgctcttgtgaaggtgaccagtttgcctggaacatcctggctatgcttgtggtcccagcattgctatgaatattccccctttcactcccggcagtgcccgaggttggatgatgtattataagagtgactccctttggcttcttcatgtccacctggttatctccctgcttcatgctgcctctgagtactggggagccaggttcccaaaatataggtccccaaagtaggttctgcccatgccactgagctgtctgctccacaaactcagctcttcctcttttccttcttctctgcactttgtctcttctccttccttgatccttacagccatcctctcctttcctgcttccctgtccgtgccttaggattctgctggtgcacacaggtaccgtctggctttattgggacttccccctgaccctgtacttggacggaaccctttatggctctaactaaactgtgccttatcaaatttctctcagaggaaaggaagcgatttgaaaaggcaaagaaatgaccaatagatggatgagtggaacaatgtgctggtttttgttgttgttgttgttgctgtttctttgtgtgtgtgtgtgtgtgtgtgtgtgtgtgtgtgtgtgtgtgtgtgttgtgttggtaggaacaaaaagtgtaccagtttgaaatggtccattgaatgctagacctgtctatagaactgtccccagggctattttttttattttttatttttattttttgagacggagtatcgctcttgtcactcaggctggagtgcaatggcgcaatctcagctcactgcaaacaccgcctcccgggttcaaccaattctcctgcttggcctcctgaatagctgggattacaggtgcctgccaccaagcccagctaatttctgtatttttagtagaaatgaggttttgccacgttggccaggctggtctcgaacttctgacctcaggtgatccacccgcctcagcttccaaagtgctgggattacaggtgtgagccaccaagcctggcccccagggctattttacaggaaaccctggaggctcctctgcaagacagcggcctccatgtgtgtcagtgcagaaagcaaaacctctggagcccaagggcctggacccatttctgccactcactaacagctgacaaaggaccatgatttcgcaaagactcagtttctccatccgtaaaatagggcagacttgtctctagaacaccgtgattctatgacattgtaagaggccgtggacctgctcttaagatcctgaattctgcaatattctgcaatatttggcaattacatcttttagctcttctctaggggaaacatacgagggaaacagggccttggaaaatataaaatctgaactaattctcacctaaggtatcatggcaagtgcctgagtcctctgtgcattgcaacaaaatagacactattttgtgtggaagaaaagcaagagagagatgtgaactcagtgggtgattagcctgtccctgaggaatccctcactagctctcccctagcttctctcagctgcattgccagtacccaggcagcctgcagattcaaccctccctccccacaacaggttcagcaaaccattgcaacaaggagccccaaggcagaatggatggctactgcggccactgccccagtgctggggcctgccttctgcaggctcaccacagcgtgacgcatctccaatcaccccccacacctggggttccatctctgtcagtggcatcaccagccactctaactctggaatccaaatcgccatcatcttggtctcttctgctctggtccctgacatttattcagttaccagattgcatctactccattgttctctgggttaaaatccccatcccaccacttattttctgtatgaccttggataaaccacctaacctctctctcagtttcctcctctacaatatggaacaatcatagcaatctcctcatgaggttgtcaggaggattaaatgagattaaacatgaaaatctcctaccacaggccctggcacatggcagatgacttttcccctacccccaagccttttagccccttcctgtccattcccaccagccctgttcaacccctcatggtgactgcaatgggcttcttcccaggttctcttcccacagcttcctccactgcagtacatcccatacccaggtgcagatgacatgttcttctgaacccagctccaggaacaacacttcccttcttagaaaccatcaaaatatccctaggcttaataatgaagtttctagactcgtaacactccaagcctctgccatctctcccaggcagcactcctcaccggattgtccactacattactccttgctcctcaggtacaacccaccttcacggctttgctcagccgtccttccccaagatgcccagacccagcctcctattcaaggcccggcctcagtgccacatccaggacgccctctgcgagtcactccttccagaagtaacctccctcctccaaactccctctacacactttatagtatagaaccgagaggtgacaggacctcggaagccgtacctgaagcctctcacttatagaaccgagaggtgacaggacctcggaagccatacctgaagcctctcacttatcacttaaaaactgcgcatgaagtagctcttatgggcaaatactaaaccatgaggttgtacatattcatttcacctgaaaaggggcatgaactctggacccttcaacaaaaatgctgattccacgtggagcaaactgctctgatttcatatccctatgcccacatccttgataaaaagactcttcggtacatgctgctttcttccagagacaaggaacccatcacctcatgagttaggttcttcctcctgaccctctgaccaccctggggactcccacggattggctctttctgtcctcttgagtcacacagaacgaattcctttgagactcctggtgtcctccacagagccaaacagggcaggttcctaagcacactgtgtaaacagataaatgaactcagagggctttcccacgtggcagggtacattcgctgcatcccgtgcatgcatgggtgcacagacacacactcgcacacacacggacacacacacacacacacggacacacacacacagacacacacacacacggacacacacacacacggacagagtcagcacaacgcctctgagccacacagccaggccagcacacgcgggggccagggcggaagccaagccccagcagccgcccacttcctgacctccttcctttgctctgggaggttctctctctgtgtctttctgactgtctgtctcggttctttgtttctcggcatggcaacagttgtggatgctgcctgcgtggccagggctcctagtagcactgacctgcaaggtaggagttttggttcttagacttgagaccttgggcaagtcactttaccattctgagcctcagtttcctcatctgtgaaatgaagaggctggatgaggctggagggttcctaaggtcctttcctgaccaaaaccctagtgcttctcggctctcctccagtcccgttaccgagtgacagggaggggagcaagggccaggccaggcctgggggtggcaggggagccagctgttcccccccaagggcacacagcctccatccaggccctctgcgagttccatgtgcggcagacacgcgctcacacttcgcagccggaggagcaggcaggaagcgccgccccccggccgccccggccgcccaccctcaaccttcctccacgttaccttgggcgtgtaggcttcccgtggacctgcccgcgccgcccgctcggctctcagctgtcaagcagccgcctgctccgcccgactctttccgctccgagccgcgcgggctggaccagcccctcagcggagctgaacgggaagcggcgccccctggacgccctccgggacgtgcgcgcgccaagcggtggggtccgggcctgcaggcgcgacctgaggccgccagggaggctgggtggcgagggcggggcggctgccgacttagccggcctgactggtcgggcttccggggtcccgctgctccctaggccccttgccccgattcaggctcccaaggtggggcatcagtccggccctcgctggctcactggagaggtggtgtctgggagtgcacccccgaaaacccggcagcagcccggcgtcactccggctgttacctctgggagcagaaactaaaggggatccttattctttatacttttctgactcttctatatattctactgtgggcatgaatcgttaaaaacaaaacaaaacaccaaaaacccaatacgtatttgttaataaagcactgagtaaatcttcaaaggcctcccgaggtgctccggctgcaggataacccctcagcttagcgcacaaggcaaggcccaccctgccctctccggccacaacctaattttccagcctcaccctctctccctcacacacacacaacactttcgctctggacacactagctgttgccaaacaccagctgttcttcatggctgctgggagttcttctttttgcctggaacaccctcccctttcatctctgcctgttgaaatcctactcatccatccaggcccctctgaaatgtcacctttttggagaacccttccccagacactgcccctgcagagtgccccagttctttcctggcaagcccatctttctggtactggtttatgtagtagcatccccctctcacacgcgctaagtcctattccaaggtggagagaaacaaattagcacttactgagcagctgttataaattactctgtggagtcctttcttctccttgcagcccagccagccactagcccacaacctccctccaccctgccagagtttcagaaggctgtcaggggctctgaggcctgccctctggtgtgtccctactgcgtgccttggcttttctggctctgtcctgggtatgcttccctgtgtcaactcccaaggtctgcaagctggtggcttgaccttctctcagccttatgtgaggaaagaaggacatttcattatcagaatctgagaagtggaaggggcctcagagattatccagtgtaaagcctgcccacccattttacagagcagaaaactgtgaccagagagataaggtcagaggcatcggaggtacctaccattgttattgttgtttttaatagtgttaatacttgcacgtttagatcgcctttcacttctaaatcaatgcgttgtcattcatttgccccttacagtctcagaggtattacagtggttagtgcacagactctggaggccaaagccctgggtttgaatctcagtgctccaacttgccagctacgtccttggcaagttactggaactttctccatcagtacaatgtggatagtaacagctcctgcatcatggggtgttctatgaatcgaaataaatgtgtatcttt

SEQ ID NO: 129 - DNA, 220465 bp, Homo sapiens
  source 1..220465: mol_type = genomic DNA
cttaggccatatagcatagcctattgctctgaccaccatcatatatgcagtctgtcattgacccaaatattgttatgcaatgcatgactgtaataataataatacttgccacataggtaaaaatactgtcattaacggtgtagtaaaatggtaactggcatagtaatgctgtaaattgaatacaatttttagaaggttttgaggagggaggttcagaactgttctccattgatttgcttaacaaagatattttcattttccaccaaagggtttggctgtgaaaacctttgcagaaataatattttaggagttttttccccctgtactgtcaactgatttttagtaagcatatgactttctgtatgtatcatccaattgatttaaaaatgaatcaatgaatgtatttattgatcgcctgcctcgcttcacaaaggaatgtgaggaaggacacccaatttggcattgctgtgtttctctgtatttgggtcatgcattttttcttgctttccacattgaaaatgtggtggatgcagtagattggctttaagtgtcaggccttccctcatttactatacctttttgtgtttcacaagctggaaagctaccaactacatgctctagacatccttgctgctaatattctgcatgtcagattggtctcaccaatggcacgcagcaaagcaagatttgcaggtgctgttttcttgctgctggcaaatgcagccgtggagaccaccgttttttgcagcactgttccagtgtcctgttaattgttctgtcggtgttgagaggaggttggggaccaggcatggcaacttcctgacgccatcttcctgattgtgggcagcagccacaatcagcaatcttatctaggtagtcatccatggatgttcagctcagcccttctccagcctttccaatgatttcgaatgtccccaattccccctaacgaatccctttctgactaggagtaactagctgagtgctgcaatgaaatcctgactgacagatttgtaaactctttgcgggcaggaacccttgatataaataaatgaccttgcattttaatggagggaagcagaaggataaacaaatgaataagtgaaaagttttaataagatggtgatgcgtaaaaaataaagctggttaatggggagtgcaggaaatgagcgcagctgtcttgccgttttaatcagataggtcagagaaggcttctctactagggtggcttttgacctgcctctctgttaggtcaattgtgtgcgaggccctgatggagttactgtgttaaaatgcaatgattcaattactccattacttagataccctttaagtgacactacggttgtccatctccccgctattgaattgtttacccacagtaagcatggcgggaagagcttcgatccgacccttgaacgctcaataaaaatggcgacagcacttcctgtacttgccctcaacaaagatggtgtcaacacttcctgtttagggttttcgccattaacaaagatggtgcttatggggcaggttccctaacagtcaggattccggttgcagtttttctcccccgccccaaagatacgtggttgcagacgtaagtaacaggaatccatctttctttgaaagtcctgcattgtagcgtctgcgacctgggccctgcgggggcttccccgccccgctaacttgctccgcatttccgatccgggccaaggctgggtggctgcggcagtgccggaggcccgctctccccttggtccgctctttagttcattcccagcactccctctttagcgggtcaagttgccgcagaaaccgcccgtagtcttcctgtttgatacaagggtttcagcggccgaagcagagcctttttaaatagttcccaatgggcgctcacggccaaacgtgaacacctcccctcctcacctgtcacctcctgaactttacagggttgcgagggggagtgtgggatcgggtgtcgcctagccgtggtcgtactgcccgggtgtgtctgaagccccatctgtcatccctgcctgccttcccggtcacttaaccttcactgccttacacacaaccaagccacagcacactggtgcaggggtggtggaactgcaccttcaaatcgtgcctggctactgaccagtgctggggtgtgtgctttttttgaaagaaaaaaatcccataaaatgtcccatgcatgtgcggccacgacagtgttgtgctggagattcggaattcttagtgggaaggaatggagtctgtgactgtatattgtgtaaagtttattgtagactgggcacaaacaacaattttcttaaaggtgatcgtgtagaggacttttagcgaaaagagccttaaattctgaacctgctgatttctgtcctgcactcctattactgatcaggttttgcaaatacttgtgatcaaaaaaaggggacctgcgtccaccttggcagtttctgccttggtggtggtggtgcaggtctgatgagggcaatgtgaaaataaaaccaccatttcttctccagcgtgttaaaattagtgctgctctgtaatcttcagataaaaattgcttgttcagaagggtctctgacccactttttttttttctttttccaaatttctttattgaacgaggaattgagctgggaccccattgtgtgaaaagcagaaacagaaaagatgattcatcttcattgttgttcattatgttaggaaacattcaaaattaacctggcttggcttaatcagtgaattaaataccatgacctggcagtctgctatggtttaaagatgtgcttgacctgaaggaacttacattgcagtgacactgtctttagggccacatcaacatgtctgtaatttgagctgtgattttggctctttccagggagaaatggaggccagagacaaacaagtactccgctcacttcgcctggagctgggtgcagaggtattggtggagggactggttcttcagtacctctaccaggaaggaatcttgacggaaaaccatattcaagaaatcaatgctcaaaccacaggcctccggaaaacaatgctcctgctggatatcctaccttccaggggccctaaagcatttgatacattcctagattccctacaggagtttccctgggtcagggagaagctgaagaaggcaagggaagaggccatgaccgacctgcctgcaggtaggcctcagaaagatcactttgaaccagctccaaaatgttgtaactatgctctttgcttttttgtttatttgtttgtttgtttttgagacagagtcttgctctgttgcccaggctggagtgcaatggtgtgatctcggctcactgcaacctctgcttcctgggttcaagcaattcacttgcttcagcctcccgagttgctgggaatacaggcatttgccaccatgccctgctaagttttgtatttttagtagagatggggtttcatcatgttggccaggctggtctcgaactccgtacctcaggtgatccacccacctccgcctcccaaagtgctgggattacagacgtgagccaccacacctagccagaactatgccctttggatttgaagttgggatgtaaggcaggacaagggtcaatggttgatgaaagtgggtaaggatttgggactgaagggacatgacgttggaggaataggatcaggaggtggcattaggaagtgcagggaaggaagaatgaaccgtgactgggaggtgagggagggagctcagagaatgcatttagaaatgcttccaggaaacctggcatgtcacttgggaagcatgttctcatcagagagccaggtcatatctcagccgttggcatcaggagccatttggaaagtgcagatgggaaagcaggcattcggcctactgacaactgatttgtgaggtgccagagctaccagctggaaaaggtcagattcatggaggaggagacagcctctaggaaggcatgccctgcacctgtcccctgggctgtcctgtgtggccaaaggggattattttgaaggctgacttagtttgtttttaaaggttattcgtttaaagtgtcctttttagtttagctttgttcagacactggagtatttaattttgcaaagagcaatagtttggggagggtctcagtttaatttgaaggagaattggaagctggagaagagagaaacagttctggttctgttagcctggcttgtagcaggaagaagatgtgatatggaaacacttgctttttcttaacctcccttgactctgtttcacaaagatagaggggcagagaactgaactggcaaaaattaaaaattgaaaaaaaaaagtaattgaaagttggcttgcaaatttttaacaaagttagagaatcaaggttctctggggtttctgataagagtgatagaactattccggttcagtgggccccagacttcgtggttgctattttttaaatactggttaaaaaaaatgaatactgataataagaccacttttactatttttgctccatggacctcatattttgacatatgtctgaatacctgatcagcatgacatagccagctaactttaggaagacctggtaagatcccagtggaaaaagcaaaagtattttcattcctagtctgggctcgttacagttaaatgtatctttaggctttttgaaatattagacatagctggcttttgaggaccactggaattcactgcttggattgtccttacaaaattaaatactccacatgtctgaacaaaatgtatctagatgtttttatgactttattgaaagcagaatagataacatagagttggagaaatgttaaaaaattattggtgttttcctgatatttgacttagaggtttctgctggcatcatatagttggaaacaacaaaacaggtgaactgaaagcctttcactatcaaaatactgaatttaattttatggtcattttgggtgatacagatcatgctgttgtatgtcattcgtagaggtataataccatttttttttttttgagacggagtttcactcttgttgcccaggctggagtgcaatggcgcgatctcggctctctgcaacctctgcctcccgggtttaagcaattcttctgcctcagcctcccgagtagctgggattacaggcatgtgccaccatgctcggctaattttgtatttttagtagagatggggtttctccatgttggtcaggctggtcttaaactcccgacctcaggtgatccgcccacctcggcctcccaaagtgctgggattacaggcgtgagccaccatgctcggccataaccccattatttcttcagattcattcagagagttagaaagaattaaggcattttttacaaaatgatgagagttacagagaagctgaggaaaaatagctttttaaaaaagcaaacagaatgaagcagtacataatgggaaaaaaattgagcatatctgtgtagaagtttagaaaaataaggtttttctcaagatttgttaattctgtagaaggttggctctggaacaaattcgtacagtcatcttaattgttttactttttactgagtaacactgctattgaaaaaaacattctgaagtgagggtttgatttatatatgtctttgaataccttccacggtgacaatcacataaactcttttaaaaaagacttgtatttattaaatattgactattttaaataatattacaaaatataagtaagatatggagaataatggtacagcgaacacccgtctcctcatcactcagtttaagaaaaataatattacgattgcctttaaaaaccccgggcactccttcccaatcttgtctcattcccaacccccacgcagtgaaaagccctgaattgggggtttatcattcattcacttcttcactttatagtttcctatctcctaaaaatcacttttaaaatcttcatatgtttttgaaaatcctgtataccgtaagttctagaggtgtgtgtgtgtgtatatgtatatatgtatatagagagagatatatatgttttttgtgtgtgtgggaaggaaagggtggaagtaatggaagaaattatgcatttaaacttgatagttaacaccttctcttgtttcagaacttaaaatattttttacatgtttaaagtaatttaattggtggcaatattttaattctaaaattaaattgggatttactgaattggaaacctaggttttgttattttgtaaatcctgggaagagtatcagagttgaaatcccttcaatttaacgtccctataaaaaagaaatccagaacctactgcctaagacctcggtgcttctccagtgttgtaattgagtaattttagtaagatttaaaatagtccacttaaatttttgtaaagatatctttgagttttgaggatctagactataggagaatgtgtgtacacattaacctcttaatgtatgtacacattaaactcttcctaccttttcctcattttgatcatacttattaattaatttgtatggattcagtagtctcttgggaggccttgagaacaaatgggaaggaatggccttcttttttagccaagacgttgatccttctctaagaatgaactgattttatcttattaaggttttcttgtgttggtcttcccagagatgcttggtttcccctttattggtttgttgttttaattttcgttgtttcacttgtaaattttgagctgtctcagaggctttattttggtgattgttcctggttagttgctttttacttatgtgctggatgtaatttgtttagagaattgagctgtatcttgttcttctctactcttctgaacgccacccccatcaaatctcaaaacatacaaaaacaccctaaaccttttgattctctcagaatctgcctctgtgactagtctcccaatctctgttaggaaaaaaaaaaaggtttaagttgttaaagttgttaatggatcattggttttgtgtttttctcaccctgtaaggactcttaccttttaaaagaggaattctggtgataaaatgacttaatccaccttggcaccgtggagagaacacttcatggtttgtctctctggccaaggtcacatactagacattagatcagctggaaatcctctctgggctcctgtcaggtcatttaggagatagggacagtgccgtgtctgggtgaaggcagcctgtgcctgcctgcctggcttctcactgctcatggggcctgtcggcactgacaggctccctccagtgcctgagctaatctggatctggaaaggaggttgatggcagcccagcctccccatctggtgggactcagcgtaaatcacggtgggagtgactcctgggccacaggaccccctccctgttccactgtgttggccctggctgtgggtctgggtgtctgccatgattctctgccttttgccccagtcttcctttaagcttgggagtgtttttgtttttctctcctccgttggtttgattcatgctttatgtattcttagccatggcgagagtgaagaacagagctctgggaacacagctcggtgcctccggcatcagcattggatgtctcaactcttgagcctgttggaatggctgtccctaagctgacacttgcttcaaccttctctgggcttgatcttgtcctccccatagactctgtgccctggactccctggctgctcttacaacagcagtgcgcaggactggctagtccatttcccctctacctgtgggctcaagggctctgcctgccccttgtggcgccagccttgagtgacaacacagaaccacacctgccgccctcctgagatacattctagctctgagttgcatacttggatgcatctaaagtcactgagctcttaatggcagatattttagatattgtgatgggtttattagagaggtttctagcttgggattcttttcataggttcctccaatcataccacgtaattgaccttgctctgcatgtaagttcagtgttggtctcagtgtatctagcttgcagtctatccatgtgcttccactgtgactgagtagtgtttgcctagtggcgtcctgtgtgctagagtgagaacagtgggtcagtatccatagcaagacccttccctcggtaaagggagagtctgcagagggcccaggtttctgtgtatacccagcccgattttcatatacttcctaaggacctactgaatgccaggtactgggtatataaagacaaatggaggatctccagatcagttgagggcattcatgcgttcatccagcaaatatttgctgagtcttgaccatgtgctaaaccagaggtccccagcctttttggcgtcagagactggttttgtggaagacaatttttcaaccaacgggagagttggggggaatgatggtttcgggatgaaactgttccaccttagattattaccaggcattagattctcataaggagtgcgcgacctcgatctctggcatgtgcagttcacaataggttcatgctcctatgagagtctaatgccactgctgatccaataggaggaggagctcaggtggtaatcctcgcttgcctgccacttacctcctgctctgcgatccggttcctaataggccacggaccggtatgggagttggggacccctgtgcaagacagtaggtgctggagatataacagtaaacaaaacaaagcccttattttcatggagttcaatgtattctagtagagggaggggataagggcagggacagataataagcaaatgaataaataacatttggtggtgaagagcgctatgaagagaagcggtatgtgtggtggtgggggtggtcagggaaagcctctctgatgaggggacactgagcagagaactgagtttggctgcagagttgatacagggaggagagctttcagatagaggggaccacaaatacacaggaagtcaagtgggagccacaggtgacaatgtggctaataagacaccttcctccctgggatgaatcacattccacatcagcagaggctcagtggctaccttttgttttgctctcaacatgtgagatgtgtgtgcagccgtgatcttgtgtggctcgtagcatgactttagttgatacgtggatgtgggattaagtaatattgaattacatgatgagaaagttatttcctttctatttctgtttcagttcggtaagaatgataggaggtcctcatgcttaaagccttctgtgggcaacagtatttagctagaatctagttgtattgctttttttgtgtcaacttaatgggttccttccatttatggcaagcaaaacttttctatttacgaagttccttttaaaaatacatgacttttagagactagaattgtggttattagggactgggaagggtatgagggaggcagggatggggaggttggttaatggatacaaaattacagctagatgggtggaataagttctaatgtcctagcactgtagggtgaatatggttaacaggaatttattatgtgttttcaaaatgctagaagagaggattttgaatattcccagcacaaagaaagaataaatgtttgacatgatggatatactgattgcccttatttgatcattacacattgtatgcatgtattgaaatgttaccctgtatcccataaatatatacaatttttatgtatcaaccaaaaataaaaagaaaaatgttcataggaatattgaataggaaataagattgaaagtataccaaattatttaggaaaaaaccattacttacatttaagtagaaatgtgtcaacataaaggagactataaaaaaataggccaggcacagtggctcactcctgtgatcccagcattttgggaggccgaggcgggcagatcacctgaggtcaggagtttgagaccagcctggccaacatggtgaaacccccatctctacttaaaatacaaaaattagccaggcgtggtggcaggcgcctggaatcccagctacttgggaggctgaggcaggagaatcgcttgaacctggcaggtggaggttgtagtgagctgagatcgcgccattgcactccagcctgggggacaagagcgaaacttcgtctaaaaaacaaaaccaacggaaataatggttgggtgtagtggctcatgcctgtaatccctacactttgggaggctgaggcgggtgaatcacttgaggtcaggagtttgagaccagcctggccaacatggtgaaaccccatttttactaaaaatacaaaaaattaaccgggtgtggtggcaggcacctgtaatcctagctagtcaggaggctgaggcaggagaattgcttgaactcaggaggtggaggttgcagtgagccgagattgtgccactgcactccagcctgggcaacagagtgagactccatcccccccaaaaaaaaaaaaaaaaaaaaagaaaagaaaataataatggtgtgaggatgtggccaaaagttgcttttcatcatatatttttttaatttaaaaagaaagacaggcatttgggggaggagccatcacctggctggcatagttaaagcaggaaggctccagttctagtatagatagtagatagagctgttttcatgatgcttcacagttttgctctttcaatttatgcccagtgataggaattagttaaattaactagaatttcaaaattcgtaagttctctaaattttaaacacatttacttgctagtgaaacaaagtcagcaagatggagccatatcctggtattatgaattttagaactgggtgggactcacaggtcatctaatttttctctgagaaaacagaggcctagggagattaagtcaacttgcccatgatcacacagctagttaatgtaatttattactgggactagaatccaggctttgcaactcttgatttaggactttttctgctgcgcaatcttggcttcccactgagtttgaaatggaattgtattatgctgcagtgttaataattgaaagaggctttttaaaaattgtactaatgcatttttttttttttcattttaagaggagaatttccaagggcctttagaggtatgctggaatgagatttcactaaaatattttatttttatgaatgctaattttaatcatttaaaaggaaatgatgatcgttcagtactgcattttgtcacaagatttttttcttcctacctctgcaaggctgacataaaggaaaagcggaagactttcatcgagtatttatgggactgatgaaataatgcatctgttggcagctaattgcaggtctttctaggaatagcaaacatgtgacaggtcttgccccagcggagatgcctccatttcactttaaaacatggatttggtattcttttcacttagaaattctggctatgcctttttttctcccttctgtggatgtatagaccgttcggctgcatcagacactgtattgaacatcagggttgatttaactcattgttgctcagctgtggctatgctttggaatcacctggggagcttttacaaaactactgatgcccaggctctactccaggtgaatccattacacaatctctggagggtgggttctgggcaatgggatgttaaaggcacacacgggcatgcccatgtgtaagtcaggcacacgtacaaatgcttcgtgaggtcatcttaaattgcagccggggttgagaaccttgagctctgaccagctggttaggagcgtgcctccttcctcactcactgcttccaagtcgtggcttcccaaagctgtgtacttgcttgaagcattgttcttattttcaggtagcaccagatggaagggtggtaggaatcagggtgtagagggatattagtttgcaaatccttttattccttgaatttcctgagcattgttgctcaagaatgttccagaatctcagaccccatacagggggtgatgctgctaccaacattaaaatccattagggctctatggggatatataggctacacacatgaggcaacaattggaggagtttgaattgctagtgaatttgaatttgggaattatttttattgctattcacattgtttggtacagtcattacaaactacatgcagtaccttgtgctctgtagatcaggttatgtccaaatggagacagagtctcctgctgaagaacgagttggatgctcctctcagttaaaaagtgagctgaagatggctcgaggatggaagagagaaggagagacaaatggctagttgggaagagtgggactggcttagtctgtcagactggctgtctgtctgctcatggtctttattcataattaaaaatgaatttcaggccaggtgcattggctcacgcctgttaattccaacagtttgggagaccaaggtgggaggatcacatgaggtcaggagttcaagaccagcctgggcaacatggcaaaaccccgtttctactaaaaatacaaaaagtagctgggcatggtggcacacacctgtcatcccagcttcttgggtggctgaggcacaagaatcacttgaacccaggaggcagaggttgcaatgagtcgagagcacactccatcctgggtgacagagtgagaccctgtctcaaaaaaaaaaaaaaaagcaaaagcagtcttttgtgtctcacaaagaacttcagataacatcagtaaaataatcataatagctagtggggacttactgtctgccagctatattctaagtcctttgtgtttattaattcatttaatcctgacaataacttgatgagggaggtggtattattacccttttgaacagatgcgaaaatgtaagcacagagatagatgttaaataacttacttaaagtcacacaacataaagtcaaatttcacttcaaggcctactgattcatatcttataaaaccactttctcggcattcagttttctcctcttcctaattctgataacctgtggctgctccagagcccatcaccctaattcttcttcagaaactcccctacttccagtttcttccagacacacagcctcaggaggctttctctttcttgcctcttgtcctaaggctgattcctggttggtatctctctcgtatctctcattttatacttttttggttgggggaaggctagggtctaatggaagaccatacggtggggaggggtcatggaacagagcccctgaatctctcccatttcaacttgctactttgagagtaaaaaaaagactaaatctccttggctgtgatcaggagatagtgtgttggctcccctgatactggaatccagtcccacttttgcagctcttaaatcttgctatctaaagccctcagttccaataaccagcttttctggtggtgcagcttcagagtttcaccaaatgcttagcaaggtagtgttctctttttatgggtgtagttcaaacttgtaggctgctgttatagctagctgtgggaatgtttgctttacataatgttaataggcagctgtgtttatgcttgttcctcagtttaagcagtaaggagtgtatacatatgattctttgagggcatttcccccagactaaaaaaaagaaaaaaaggtatgttgtgttttttccaacagtaaattttaattgaaaaggaatgtagtttctagaagaagtttggggcaggttttactcctaggctttattttgttaatgttatgaaagaaactttaactccttctaagaagtgccaagttgacaattcctggaaatgttcatgttctatttatgctcagcaccatagcagacagggtggcaataccattaccaaaataataccgccgagatgtactaagtgacaaatgagaggcttctggttttataacctaaatacaagactttaaaagcatctcccaattctaccatttgttgataaggtctgtgggtgctgagtagtaatggtgaagttgctgtggagaattatagatcaagtagagcgtatctgcagtgacttgtcctgttgctagaactatagaaggttagagttggaagggatcttagaaacactttatagatgaggaaacgaagggatatccaagtctaacagcatgcatatgggttcttctgttcaaatagtagaacttcatgtaacataaaaataggaatttctctgaaatatattgggtagttcacaactttgaaggaatgataaaggtttcagggcttaataagggcaggaatgaggcaacagtgggggatctcaggccatcagatggtcatcttcaatcaagtttctacactgtaccttccttccagattcagactattggccaaacttgggtcctgagcccttcctctaggacaccagaatcacctgaagtggggaaaggaagttccaaaagaaagagtgaaagctgattgaagcaagagttgtctactgtgccatccttcttctttttggattgaataggtctcacgcccatgggcctggaaaacaaatgatagccctttaagggaggaggttgctttacctcttcttcatacagcaaggcccaggttgagggccaaaggtggtagataaaacgctggagagcagttttggagcagcataggtctccttaaacttttccaaaatcagaatgtattgggggagaaaaatggattgagaatgtagatgtaaagaggaggtttagaaagagaatttgaattgggtactggcctaagggctttagatatataaactcactttattatcataatagccctttgaggtaggcactactgttatcatttgcatttcacagatgaggagactaaggtgttagataaattgctcaaggtcacacagtttggcagtagcagagctgaggttcaaacactgacagtctggctcacagtctgtgcttctaatcactagggtcctgtctctatcggtctactaccagttcttagatctgattggagtcacatggcttagatgacctgacctgggctagctgcagcttctttattttctgacccttgcttgcctcaggtctcacacatagccggcattttcattatgtgtatgtcagtctcttttttaacagttaccaaattttaaaaaatacaaaagaaaatgaaagatgttttctaagaaatatgattaggtaaaataaaggttttgaatgtgattgatgtggacatttttgttcatttagtttttaaacatatctcttccctttcaatctctttattattaattagttatgtgctacgggcaaatgtgacttttcaggcctttcatatttgtttgagcccttttattccatcatgtgccagtcacaattcattcaggagacagaaaccacacagtaatttaaatagggaaaacttaatataaagaattttcttttgttttctttttttttttttttgagacagagttttactctcgtcgcccaggctggggtgcaatggcgcgatcctggctcactgcaacctccgcctcccgggttcaagcaattctcctgcctcagccttccgagtagctgggattacaggtgcccgccaccatgcctggctaatttttgtattgttagtagagacagggtttcaccatgttggccaggctggtctcgaactcctgacctcaggtgatctgcccgccttggcctcccaaagtgctgggattacaggcatgagccaccgtgcctggccaatataaagaatttttaactggtgaaaagcaaaccatggttaaccactaaatggggtaaaagaggtctctaagtaatacaggaatggcagaagctactttttctgaggttgaaaggtagtgcaggatacagtcactaagaatgtggaagagggccctccccacctctaaggctgagattcagacttcggtggagttgaagtgactgtcacactagctggtctgtaagagcagcctacctggtagctaacttcaagaaaatccagagaaataattgcatgaagtcagaaaagtaataaatgaccaaaatgagaaattttgaaattatttaaaaaaatcaaatagaaattctggagctgaattaggaaaaataactaatgcatgtgggcttaatacctaggtgatgggttgataggtgcagcaaaccatcatggcacacatttacctatgtaacaaacctgtatatcctgcacatgtagtccaggacttaaagtaaaaattaaaattaaattctggagccgaaataaaaattaatggactgaaaaatgcaatagagagtatcaacagcagaattaatcaagcagaagaaagaatctgtaaacttgaagacattatttaaaattacagttggaggagaaaaagaatgaaaaggaatgaagaaagctcatgggatttatgagacagcatcaaaagaacaaacatttgaataataggagttaaggcagaggaagagagataaagtggtagaaagctgttttaaagaaatattagcagaaaactttccaaatctggggaaagatataatatccaggtacaggaaggtcaaagtctctaattagattcaatccaaacaagactacactaagccttattataattaaactgtcaaaaaacaaagacaaagagaagaccctgacagcagcaagagaaaagaagcaaataacatataagacaatttcaataagcctagtagtacatttctcagcagaaactttataggccaggagagagtaggatgatatgttcaaaatgttgatggaaaaaaaaaattgctaacaatgaatagtgtagccggcaaaaccgttctttagaagtgaaggagagaatgatactttcccagataaagctgagaaagtttatcaccaccacacctgtttttacaagaaaggctagtggagtcttcaagtggaaagaaatggaaggttaataataacatggaaacgtacgaaagtataaaacttacatagtcaaatttggaatctccaatactgtaatggttgtatgtaaatcatttacatctttagtttgaaggttaaaagatgaaactattaaaatggatataacaacttataaagtatatacaaaacaaaaagacataaattgtgccatcaaaaactaaaatatgggggtgatggtggagtaaagtgtagaatttttgtatgtgatcaaaattgagttgttatcagcttaaaataactggctgtttataaaatgtttttgtaagcttcatggtaaccataaaacaaaaacctatggtatatacacaaaaaataaaaggtaagggaccaaaggatatcactagagaaaattacctaatcacactggaagacagccagaggaaggaaagaacaaagcatctacaaagcaaccaggaaacagttaacgaaatggcagaagcaagaccttatcattaattaccttgaatgtaaatggattaaattctccagttaaaagacagggtgtctgaatgggttttataaaaagcacaagacccaactatatgccatccacaaaagattcacttcctttttaagaacacatatagagtgaaaattaacgggtagaaaaatattttccatgcaaatggaaaccaaaagagagtaggagtggctatacttatgtcagaccaagtagattttaagtcaaaaattgtcaaaagagacaaagagggtcattatgtaataataagggggtcaattcattaagaaggtataatagccataaatatatatgcaccaatcactggagcacctaaatatataaatcaaatattaatagatctgaagggggagacagactagaatatagtaatagtagagaactttaataccccactttcagtaatggacaggttacccagataaaaaaagtaataaagaaacagtggatttagactacactttagaccaaatggacctaacagacatttacagaacattccatccaatggtatcaagaatacatattttgattagcttagtaatgtataaggatattgagtcagtaatacaaattctcccattaatgaaaagcccagaacctgatggcttcattgctgaattctgccaaacattcaaagaacaaataccaatctttctcaaactcttctacaaaattgaagaagaggaaatacttccaagcttattttgtaaggccagaatttactttgatatcaaagctagataaggatacaagaatagaaaattacagaccaatattctattcttgatcaacataggtgcaaaaattgtcaacaaaatactagcaaactgaatttaacagcacagtaaaagaatcattcactgtgatcaaaggatgcaaggatggtttaacatacacaaatcaataaatatgacataccacattaacagaatgaaggacaaaaactatatgatcatctcaatagttgcagaaaaagctttcgacaaatgtcaacatcccttcattataaaatctctcaacaaattaggtatagaaggaatatacttcaacacaaaaaaggttatatgggacagactcgtagctaacttcatactcaacagtggaaaactgaaagctttttcttttaagatcaggaacaagagaaggatgcccactctcaccactcttactcaacataatactggaggttctagccagaataattaggcaagataaagaaataaaaggtatctagattagaaagaaagaagttaaattatccctgtttgcaggtgacatgatcttaaatataggaaaccctaaagactctaccaaaaaactattagaactaataaatttagtaaagttgcagtatacaaaattaacataaaaatcagtagtgtttctgtacacaaacagcaaactatttgaaaaagagatcaaggaaacaatcccattttcaatagctaccaaaagaaaaatacttaggaatacttaaccaaggatgtgaaaaacctgtataatgaaaactgttaaaacattgatgaaagaaactgaagaagacacaaataaatgggaggaaacctcatgttcatggattgaaagaattaatactgttaaaatgtccatactacccaaagtgatttatagattcagtgcaatcactatcaaaattctagtgacatattttatagaaatagaaaaaacaattctgaaatttatatggaaccacaaaagaccctgaattgccaaagcagtcttgagcaaagaagaacagaactggaggcatcatactaccttctctgacttcaaaatgtgctacaaagctatactagtcagaacagcatggtgttggcataaaaacagacacatagaccaatggaacagaatagatagtccagaaatgaattcacacatttatggtcagttgattttcaacaaaggtgccaataagacacactggagaaaggacagtcttttcaataaatggtgttggaacaactggatatgcagaagaatttagaccctcatctcacaccatgtataaaaataaactcaaaatggattaaagacttaaacataagaccaaaattatgaaactactagaagaaaacctaggggaaatgctctatgacattggtctgggcaatggattttttggatatgaccccaaaagcacaagcaacaaatacaatagacaaatgggataaacaaaagcttctgcacaggaaacaacagagtaaagaagtaacctatggaatgggagaaattatttgcaaaccatatatatgataaggaattaatgtccaaaatacaccaggaactgtaaaaactcaatagcaagaaaacaacccaattaaaaaatgggcggccagcgcagtggttcatgcgtgtaatcccagcactttgggaggccgaggtgggtggcttgtctgaggtcaagagttcaagagcagcctggccaacatggtgaaaccctgtctctactaataatacaaaaattagtggtggcactcgcctgtattcccagctacttgggaggctgaggcaggagaatcacttgaaaccaggaggcggaagttgcagtgagccaagattgagattgtgccactgcactccagccttggtaacaagagcaaaactccgtctcaaaataaataaataaatgggcaaaggatgggaacagacatttctcaaaagacatacaaatggccaacaggtatatgaaaaaatgatcaacatcgcaaatcaccagggaaatggaaattaaaattataatgagatataacctcatacctattagaattctaggtgcttattaaaaatatgaaaggtaacaagtactggcatggatgtggagaaagtggaacctttgcatacttggtgagaatgtgaatcagtatagtcattatggaaaacagtatggaggttcctcaaaaaatttaaaatagaactctgtgtcttagcaatcccactactgggtatatatccagaagaagtggagtcagtatatcaaagagatagctacactttcatgttcactgcagcattatttacaatagccaagatacagaatcaacctgagtgtccatcaacagatgaatggataaagaaaatatagcatatatacataatgaaatactattcagtttttaaaaagaaataccgtcatttgtgacaacatggatgaacctaggtgatattatgcaaagtgaagtgaaacaaggcacaaaaggacagataccatataatctcacttatatgtagaatctaaaaaagttgaactcatggaagcagagagtagaatggtagataccagaggctggaggagatgtgattggggagatgttggtcacagaatgcaaaggttagttagacaggagaaataagttcaagagatctattgtgcaacatgatgactatagataattaacaacctacagttggccctttgtatctatggattcaaccaaccacaaatagaaaatatttgaaaaaaaaaaccacaataaaaaataacaattcagcaataaaaaagaatacaagtgaaaatatagtaggacaaccatttacatagcacttaccttgtattaggtattataagtaatctagagattatttaaaatatatgggaggatgtatgcaggttatatggaaatattattatcattttatatcagggacttgagcatccatggattttggtatcttgggtggtagtgggggcctgtagtccccctgcagatactgacaaatgactgtagactgtattgcattcttgaaaatcacctgagtaaatctgacatgttttcttcacaaaaagtgataagtgtatgagataatgcatattttaatcatctctatttagccatcctgcaatgaccatcctgctatggtcccaatgtctcccagaattcaacttaatccccattgtggtggtattaaggggtggtaatagggggtggtattaaggggtgaagtaattaagtcataggggctttaccctcatgaatagattagtgcctgactaaagggctggagggaactcgcttaggctcttgttgccctttggcattctgctgcgggaggacacagtgttaacctcttctgccacgtgaagatgcagcaagactgccctcaccagacaccaaatgcttgatcttgcacctttatcttggacttccagcctccagaactgtgagaagtaaatttctattgtttataaattacccaatctgtgatattttgttatagcagcaaaaatggactgccagttttcgtatttcaaaacatcatgttatacacgataaacgtgtacaatttttatttgtcagttaaaataataagttaaataagttaatttaaaaaagagatagccagtgtttataataaatgaatcatcttaacatttgagtttttgctgtaggggaggaaaaatctcttttcctcattcattctaggttcatgactgaggcccttataccaaaggacagataaacaagagcaagcatagaaatttatttaatataaattttacatgacacaggaacttttataagggagtgaagacccaaagagatggttaaacttgtgtatttttatgctaggtttgatggcatgtggatggttgtggggaaatgggattggaaaaagaatatgagctctaatgataatgaactagggtaaactttgctagggctaggtgttcctgttctctctgtgatctgcatcttccgaaataaggatgctcctttcctctggggatagggaaggcattgcacatgagagtcaccttacctgtttcaggggaaggtcagaaaatcctttctagggtttacaacctgctttaagggagaatcgggagaattgtgggagctgaggggaggtcagagtgacctgcctgcttatgctgtcttctcagattccaagtgccatatcttgggccagtgtgtcttgaatcccatcattactgttggaaattccgtttcagaagcccactctttgctaaactccagttacttctagaactggacactgctgctgaaatctggaatttcttatgtgatgccaaaaaaaggagaaaatttagaagattacgagtatgtgtgtgtttaacaaagtatatatacttttttcttcagagagtaaaacctctgaatcaacttgaagtagtcttttcaaattgttatcaaggcatgctgctatttcaactattagagagatagcaccggacttaaaagaccttctctaaatgactcttcaggaactaggaagagcatttttcactctgctgtttaaagtattttgtttgtctttctatgagtatactgtttcaaagtgtttcactagattataacctgatttttttcagtgtcttctgtttgtatgcttttaagtttctaaatcttttctcttcattgtttttccccaaattgttggactctgagtaagcttctgccagtgtcattttaaaatatatttatatccttcagatgctaaaaatagtttgtgcacttttaaatggttgaaaaagaaaagaagattacatgatgtttgaaaatcacatgaaatgcaaatttcagtgtctataaataaagttttattggaacacagccatgcttatttgttaacacgttgtctctggctgctttcacaatacaccagcagggcagagtcaggtagctgcaacagagaccttatggtccacaaaacctaaaatgtttactatctggccctttacagaaaaagcctaccacccctggtatagagtgagaaaggccagaaaccagaaaaaaaacctgtggcttttcccaaaaaagctttggtttttttcttatgaccggaatcagctttatttgcctttctttacttggtgcctaactgagtgctggattaaagcaaatgcttagttctaaaattgttttgagagtcaaaactggggaggcctttcttcagggtaaacttttcctatgaatatatatcattatctttgccattttttgagttagattttgccagaagagatttgtcataccagggccattgaagcttttctttcatttctaaaattgtacataagagaaaaagaattagataaaccaaacagataaaacccttttgtgctctgcacattcacacgaggatttagtttcagcttatcctgtgtatttactcatggtttagtctcaagatttttaagtattggcatgatgagataatgttagcatttgaatactaaccacagaaagcattaagcaaggtctgcagtcatgaagcatttgccttttgttcccatccattaggtatttaatgtattttttacatccccccaccttgtctttgttttcacctcctttgaaggaaatcttttgtcattgagactcaaacgttctgatgagtaatgctacgccagggtatgaatttcttcccattccctgagatagccattgtactattaatatttctgtctgttgtttagaagtgtagcctgtattaggttctcaatcccctaaggaatataacattttaagtgctcgtagagtgctgtgggctctaaaaggtatcaaaagcattccatcagaaatagaagctagagagcccttgtccttcaaggagtttgaagtctgtatggtaagagaggggtaacatgcatacgaattctgaacatgtactagcagcctacaaagtgaatggaatttcagcagagcatgcagcatgaaggagcgatctcagcggggaagggaataaagtagggagtgcttcgaaggtgaatctgggttttatggaaggtagagtcattggttccaggggaagaagccagtccagatggaggagacgccaagtacttccctgacatctcaggatgccttgctagaacattaaacccagcatgttgcagatggaatgagtttttctcactaaatctaggtcctgctcctgccctcagtatttccgtcaatgtcatggttttctgagttatgcacctgccacttactttaggcttttattgcttctccaaactactttgtaactggtttgcctgtacagagaagctgccagatttgtcttccaaagctttcttcctatcactgtgacccctgcacaccattccagcatccattgtgccattctctggagagctgctcttctgcatactagccaaatttgtcttccttcagtaattttttttttcttttgagatggagtctggctctgtcacccaggctggagtgcagtggcttgatctctgctcagtacaagctctgcctcctgggttcacgccattctcctgcctcagcctcccgagtagctggaacgacaggcgcccaccaccatgcccggctaattttttgtatttttagtagagacggggtttcaccttgttagccaggctggtctcgatctcctgacctcgtgatctgcccgccttggtctcccaaagtgcttggattacaggtgtgagccaccgcatccggtccagtttgttttttaatgtgctgtgctgttgggttttgtttgtttgatttttgttttgcctgagtgtctttgcctatagtgtgaatgtttttacttctctctttgccacgttaactccagttcctcctttgggctttagcttaggtgttttttcaggaagccttcccataccttctatgttggattaagtcctctctcatgcgcttctgagcatcttgcacctcctatttggtgtgcttctctataataggttgtaacttccagagggcagggacctagtgctattggacaaatggcaagtgctcaaataaaagatgttgtttttttcttaaaatatatttaaattttcctcattgtctacaaaattaatttcagacatttttaaattcatttcagaccttctgtaatatggcccgaccttatctatattaattattgaattagatttggcaacatttaacagaaaacccaaatgacagtgattttaacaagatggaaggtttatttttcccttctcctcctcttcctcctgtttctcctccatatccttctctctctctctctgtgacacacacacacacacacacacacacacacacacacaatctgtaagtagtctccagggctgtgggctggtgtgactgctccacagttaccagaggccaaggcttcttctctctttatgctttgccatccttggcacgtgatttccactctcaagattccctcatggtcctaactggctgctggagccccaggccatcttgtcccttgtgggaatagtgctagcagagtagaagggagactcagagagaggaagacaaaaaggaagctaacatgaaaaagacattttcgtcaaatgctagttctttgaacttctgggaagaaaagagtttctaggagaccacaactttttactgctttgaagattccaaattcctgagaatatgattcagttagtgagtaacattctctatgctggcaaaggaggaaattacctggatctggacctatctttggaggatgagagaggagctgttatctctcccccactgatacaatgatgttgtaatgtcttttcagtaggcatttgcctgagctcttttttttggactataatttccccccaccccactttctctaatctctgcttctcaaaatcttatctattcttcagagcctaattcctttcttttcccagaagcttttccacattctcctcatctgggatttttttttttctttgaacctccacagatttttgtgatgatctttctccatgttttaacatagataccggtaaacttatctaacgcttccctagctccctctcaccatcgaatgccatccccttgagttaagtcagggactatgccttgttcacatctgctgcagccatcacagaacctttaaaaaagtaggttcttaaatcttaaatgagtgcatgctgtgagggaaggaaagcaaatagactttttggctcaaataaagaattgatgtgtttagaagacaggtaaagagaaaagggacgagttgttggatgatcttgatatctaggctttgaatctgggcttggcagggtaggtgcatgagccctgaatataagggagctggcctagggagagaaaaaaaaccatcacttcaactcctgtcttccagggtgttgacatcattaactgccccacatccaccagatttccccagatcttagttgacatagagacattcattctgtttctcaccttaagaaaatccatcctgagttagcttcagttggtgctgctgctaggctttatggtgataggctttgggaggaactgagaatcccaaatgctaggtggtatctgaatgtggcattacgagatataatgctctaaactctgcaatttctcttgtaagacggaaacaattcaacctgttctttgactccttttctgggttttcttggctccaggcttcttagaacactgatcacactgttccaccacccccaatctttacctccattctctctaccctcccagcccccaccaaaacacaattcttttcaggcaagtgcaccatacaggtgctctggtggtcccgtaactgaggatgtagttgccagccttttagcaatatcaagagttctctggaggctcttgagagctgtggccttggttaaattggacagaatcacctttttggtaaattcccttccgattcatttcacaaatggcttaaatcatttatgttgttttgttcaatccagtcaggaaatgaaagcattgccattttaattgttttagaacagcattttacacctaatatagactcccaaagccagccaaatgcagattttggctcctagatcgctgactgcatgctgactgtgttcttgagtgtggaagaaaacagatccagccaaagactgattaccttccaaaggtcacaaaagaagtttctctttatctaagaaagaaagtaggtgccattaggtgttgattttttttaaaaagtccttttaatttaaacaatatttgaataaaaattatggtatagtcaaccacaaatcagttgatgaagtctcaaattttggcagtctcccttggttctgtgttcttgggcaagtttactttctttttctttttcttttttttttttttttgagacagggtctggttctgttgcccaggcttgagtgcagcagcgtgatcttggctcactgcaacctctgcctcaagcattgctcaagcaaccctcccacttcaacctcccagttagctgggactacaggcgcatgccaccacacctggctaatttttgtatttttttgtagagacgaggttttaccatgttgtccaggctggtgtagaacttctgagctcaagcgatctgcccacctcagcctcccaaagtgctgggattacaggcaggaaccaccatacccagcctctttttttaaaaaataattttttactttgaaataatttaagacaagaagttgcaaaaatagtactgagagatcccaggtacctttcactcagcttcccccaatgataatatcttacatgatcatagcacattgttaaaagcaggaaattgacattggtgcaatactagtaattcaagaacagaccttattggaataggttttacatgcaatctgtttttagtgtgtgtagttctgtgaaattttattacctttgtagattcatacatgcttttgatttttaatgctcacttaccgtcaaattatttggagcctttcttttttttttttttttttttttgtagagatgggggttccaccatgttacccaggctggtcttgaactcctgagctcaagggatctgcctgccttggcctcccaaagtgctggaattacaggtgtgagccaccacacctggcctatttggagcctttgtgtgaataattaataatagcaaaactggaaattatttaatctggaaatctcaatttaatactcttaacaaaaagactactggattagaaagtagaaagtcaggttctaattccagctcttcaactaggcagttaaacttctttggttaagtcatttacatatttggtacatcatgtactcatctctgaaatgagtgagctaaatgaaacaaatcttgatttccactttcccttctctaaacatccttctgtgtactgtattttaaaaggcaccatctgtattttaccacattgttctagccaaaaacttaggcatcatccttgtttccttctttgctgtacctaccctctttccttctgtatattccattagcaagtcttctacaacattccccaaatctgtctacttgagtccatcccttgcctggattactgcagtagcctccacatgtactttcccgtaaaacgttttccacatggcaatcagagccatcttttaaaaatagaaatcagactttgttattcctctgcttaaaacctcctcctaggactttacattgcactgagaatcagagctcctcaccagggcccaaaagggacaccgtgacctggggactcctgctggcttcttcagtcacatctaccattccctgccttctccctgtagcccagcacaggcctcctctgtcactccagtcggccaagtcagtgcccacctcgaggcctttgttccagcctagccgttctctgtgcctggtgtgccctgctcccagttttgctctaataagtggctccctctggtaatttaggtgtcaggcctccttgatgaggcctgcctgatcaaattagccacctcccaagtcactttctgcaacattatcctgttttgtttcttgcacagcatttaacactatctggaattatcctccgcacttgattggacttgttacttgacaagcgaatttcccttctctagactgtaagctctttcagaagtagggcagctttaactgcctggtttatcctgcatccccagaccccaggacagtgcctgtcccatcaataattatgtgttgagcagatgcatttatggaccagatcatcacagaggattttgaaattgaaaaaattacttaattaaatgaaatgtttaaaattaattttttgggattctgaagggaacttttatgattaaatttctgtgtactacaggttgcctattgtgtagtcatgttttagtaaaagttcttttcctgaggcaggaccatttcagatgggaaagataagttttctgtgctctagggacagtctcctgtctgccttgaacacattagacagatgaccttaatgatcggaagagatgcattggaaatacattcctttccctcatcagcagtgcttttgcattagcattgagcagggtttgactttcttggtgatacagaaggtgcaagaagcttagtatcatgtggtttgacatttaatcagacttgctttccttgttaacctaaaggccttcctcttctttggaatttaatgtgtcagtaatggctcctagagctggaacagatggagctgttgatgttctcacttaaacgaaaaaaaacatgatttatatcctcagcttcatttcttaaattcttgttgaactttcatttgattgtcagagccacataaccagaatgtcactaaatttgctttcgcggcattaccatctacttttgctttttaagcagttttggaaatgtgatgtagtataggaacatgagtacatgtttttaaacatgtattattcggagttaatgattcactgctgctgaaggagtagtttctgtgtgaaggcaatggttatttttttcattaaatattctcatcagaagttaatatgtttttcttctcttattctggacttgtcttataaaaaatacatgtactcgtatagctgccaatgagacaagtgttgacattttggtttcttttgttatggttttattgttgttattgctaatgaatgatttttgaagcaaatatgtactttcaagcaaatatgtgcaaatatgaagttggaagatgatattttctcttaaaagcattttaccattttcacattgccatgcccttagctttcagggtgttttcttgagtcattattttcttttgttgattctttaaaatgtaccaatggtgagtgtgaattcatagtatgaaaaatgtgggtgatagactatgattagacatagttcaagataatagtttatatgaaaaattgatgctctaaagcatttgctaccaaaatttgtttttttgtgtgtgtgttacctttactcttctccctgggtccacttaatggttctgtatttttttggagagccaaatatgtcttgaaggtagtcggggagagggaggaggagcaacatgaaatgagtgtgctgttttatcagaagccacttattcacagggcctgaagtgatagctgttgggagaagtgatattcatactgatgggggtaaaactgcctactcattttggggagcttttgttttcataataaaaattgtttgtacaaataaaggatgttctaaaggagaggactatttgcaattgagtgttttctattctggcagcatccgattgaaaatcatttcagaaattcttagtattgcatgcaatcattgtttagtagctagatctttttaactttatgatagaattgtgcatttcatttctgttttaagtcctatccatgtatttaagtagtgtaataaattattttcttgccagcagggtgacttgagtgaaaaaatatgtataatttggccaatagcctaattctgtgacctctacaatccaaatggatgccgtggcttttactttggttacatttcaaatgactttaattggcctgaaattctattagtatgattgattcaggatacccattcaaagtcatctcatttgtctgtgtcatttgtcatggatcaaatctctgggcaaagcagtcattgaaccttggttaaacctcagactgtgtccgtctgtcaattttataaatgattgggaggaaggcactcttgtgagttctggatcagtagtgatataattctgtttctgttttttgcttttttaaatctactgctacataataaaccactccaaaacttggtgccttaaaataaccattttaccttggtcatgattttgtgggttaggaattaagaaagggctcagctgggcagtttgtctctgatccacatggtgtcagctgaggaatctggggataggggatccacttttgagatctcagactcagatgtctggtgccttgactggggtgcgtggctctgggcagggggcttagctggggcccagcatgtggtctctccatgtggcttaggtttctttcagcatgggagctgggtttcccaaaatgtgaggatggaagcttcaaggctgaaggtttctcaggatgtagactcataagtcccagaacaccagttctcctgcttattggtcaagtaagtcactaaattcaacccagacttggggtcaggagggggtcagggaggggagtagcattatccttcacttttcattgggagaagaaacaaaggatttgaggccatcattaatggctagtgatgagatcacatcagaatagcatttatttaatagcaatttattactctcctgaggttcaggtggcttaaagtgcaaatattagtaggtagttccatgtaagggaatcccattccaagtggcacagccttcatttagacaaaactctgatgtaattcattctagtcatttgatggatggagactctaaaagtggcatgaatataatctcaaaatatctagaaagatgtcagtcctctgagtcattgtgcaaactagtttgttgagagagttcaaaggcatcatggatcttaacagctagaaaagattctaagagattacatcatcattatcaccttctggaaagatttattgagcatctgttaggtgccaggccctgggaatacagaagagaatatgactgattcttgccgttgagacatagttgaggacatagaattgatacacaagagatgaatagaaatccatggaatatagactaactggtaaataaaagtacaggtgataagagcacaagaaggagaagtaatcaatagaggcttagctaggggctgggaaaggctgtagggactttccgtcactccgaaaacatgaagtccaaagtggtggccattacctacaagtccctttgagatctggatccctgtatcctctctgatcccctttgctacctctcttttcctcactcactggccttcttccatggaagtataggcatttgaggatctttgccacttgctcattcctctgcctggaatgctctttttccagatattcccatagtttgctttctcacttccatcagatctctggtcaactgtgctctccaccagccttctctgaccactctatctacttcctgttcatcaacacatttatctccatgaagccagggcattgtctgccttattaattattgtatcctgagcacctagagtagtgcctggcatcattggtgcccaacaaaatatggttgaatgtatgaatgagtaaatgaatgcagaatcttgaaacagggtgtgctttttgggctgatagaacaaagtagtgtaaactgggtagcttataaacaatagaaatttaattcccacagttctagaagctgggaagtccaagatcaaggcaccagcagattaggtgtctggtgagggcccatttcctggttcatagacggtaccttgttgtgtcttcacatggtaggagggtcaagatagctctctcgggcttcttttatatgggtaccaatcttgttcatgaaggctctgccaaaggtaagatttagcaaagtggagaatagatgatattgctggatgcctgcaaggcagagtgaaagagaagcagaaagttacataatatattcatagatcatgtgcatcagctctctgacaccaggggtccttattttacaactctgagtcctgcaaaccattttgcgaatatgtaagcattgtaatagggcttgcacaggaagtgatttatttttttctttatttttaacttttattataggtttggcaatacatatgaaggtttgttaggtaggtaaacatgtgtcacagaggtttgttgtacagattatttcatcacccaggtattaagcccagtacccagtagttatcttttctgctcctctccctcttcctaccctctcccctcaagtagacccgagtatctattgtttccttctttgtattcatatgttcttaccattcagctcccactaaaaagtgagaacatgcagtatttggttttctgttcctgagttagtctgctaagggtaattagccttcagctctatccatattcccacaaaagacatgatcttattcttttttatggctgtgtagtattccatggtgcatatgtaccacattttttaaatccagtttgtcattgatgggcgtttaagttgattccatgtctttgctgttgtgaatagtgcttcggtgaacattcatgtgtgtgtgtctttatggttggatgatttatattcgtctggctatatacccagtaatgggattgctgggtcgaatggtagttctgcttttaggtctttgagccatagtactttccacaagtggttcattttaactagaatagctggttcatgactggtggcagttattggagaacttgcctttcttgaaaaatattctgtactataccatttctttgtcttttctcctgctcatatttctgtctggaatatccagctttttgtattgacctgttgaaattccacatgaatgttccaaaatatagtgacttaaaaccacagtttattatttctcacaatttggtgtgttggctgggttcagctgagtggttttctgttccatgtggtggtgtctgctagcatcactaatacagcagatgttttcagtttcagaacttggctggactagaatgcccaagaaagctttactctcatgtttcctgttggctgtgcactagagttccttagttttcctccataatatctcatttcccctggtatctagaccagccaccttacagcatggtggctgggttccaagtgtgagaataaggaagcttttacttcattttccttttccttttttttttttttttttgagacggagtcttgctctgttgcccaggctggagtgcagtggcacaatcttggctcactgcaacctctgcctcctgggttcaagcgattctccttcctcagcctccctagtagctgagattacaggtgcacaccaccacactggctaaattctgtatttttagtagagatggggtttcaccatgttggccaggctggtctcgaactcttgacctcaggtgatccacccaccttggcctcccaaagggctgggattacaggcgtgaaccaccatgcctggccagcttctatttctcttgaagcctagatctagaactggcacatcagtttcatcacatcctattggtcaaaatgagtcacaaggccagcccaaattcaaagggaggggaagtaaatgccccttcttgatgggatagttgggatgcgcagacagggataggaagaatgattagtggtgaagtttgctgacagtcctcctcagtatgcttagatatttgttagcattatcttttcagtaaaagataggtattattagtgaagtccaaggcctttgagtattatttgaaccctttggttttgagctatgaattgtttatagagtgaattgcttgaacattttgggctttattgagccacagctgaagatgatcattgattgactgcccccctccaccccaccctcccacccccgcctttttttttttttttttttgctttacttgccattcatattgtgttgtacatgttcctctgggtatattagaggttgaaatcaaaagccaaaggaatctgaagggggtcctcagctcttctctgggtcttactgtaacctagagcaagtgactccatcagcaggacaagtaaactcaggaaaagaagcaaaaaggaaacaagccagttgctctgggctgagataatgttaaatggcagagggaagcttgagttactcaactgctgcttggcttccatcttcactgtccttgtttctctgattcaattcttgcttcctacagttgatttcccacataggcaagcagagggatcttttaaaaatgtaagtcagatcatgttattctccagcttaaaaacccgaggggggatttcattgtacttgtaataaaatccagactcctcatcataaattagctcccactcttgcctctttacctcttctcttactcttctcccctccctctttatcagccacattttatttctttctgttccttgagcccttgaggttcattctgccaaattcatcccattttaggggttttgtacttgctgttccctctctctggaacactctgaccctagatctttgtgtggctggttcttcattcaagcctcagcccagaggacctcataaaaaccttttgtaccctcctagactcttttttttttttttctggagacagagtctcactctgtcccccaggttggagtgcagtggcacaatctcagctcactgcaacctccacctccccagttcaagtgattcttgtgcctcagcctcctgagtagttgggattacaggcgtgagccaccactcctggctaatttttgtatttttagtagaattggggtttcaccatgttggccaagctgctcttgaactcctgacctcaggtgatctgcccacctcggtctcccaaagtgctgggattacaggcatgagccaccacacctggtctcctagactcttaacagtgcactagacactcgccctctcacagttcctatgttctgtttttttctagcactgactgttctttttctctattttctcatgtataaaggtggggttaatgaaagaggtacatacttcgtagagttgttaagaggattaaactagttactatttagaagagtatctggagcatgatattgctctcaaatatagctttattgttatatcattctttactacctgaaattgtcctgcttagttatatgctagtttattgtctttcacttattgctagtgtcagccttttgcaagcaaggacagcatttacatatcttttttacagctcatccgtattcctagtgtgttgtcatacacagtaggtccttgacaagtactcgtaaagtcaataaatgaaaggcaggaatatttattttgaacaggccagaaaaaacattagtaacattaaattaaagcttgcgaaagttgaatggattgtaaaagattgtttagttgttcaaaatgggttttggatttttgatccagaagcattctgttccaggacactgaaagaacccagggataattcattgttaatttttatttttatggaattttgaagagtgagaaattgttggaattatgaagacaggtaaatgacattctgattttcgagagtgaggaatgtgggcttaaaaactgtagactaggagctttatgctacttgtgggcagaattctagaatgggttattaaaaggatgatttgtgaatgcttaggacagtgttgtttagtgggaaagtggagcacccttagagaaaagaggcctggagaaatgaattgattttttttttcaggtgactactgagcttggtggcagaattgagaataaagactccctgacttcagaccagtgttctctctgttccagtagtgttttcaatctgggaccatagagctgctcaaattcaagcaaaatagaatcttttttgtgtgtgtctttattttgaagatcgtttttttttaaagccattttcaaaaacagtttttcagttggggtacattgacctctgaaagttctaggacacagtctcaggagcccatgagatttagttctccttcccaccacttcaaaagaggtctgtgcggtactctaggttcagaaacttggcaccatgatattttgccagtttatcttattaactgaatgctgtctgtagtgactctgcagaaaacagtgttatgttcttctgtcagacttgtgctgttcaatatggttgcacgtagctatgtgtggccattgagcgtgaaaatgtgactcctgtaagttgattatagactaccatgtaatatagtcacccctcagtgtccgaggggtattggttccaggaccccctgcacataccaaaatccacagatgctcaagttcctcatataaaaatggcatcgtatttttatgtgatctacatacagcctcctgtatactttaaatcatctctggataatttataatacctaatacaatataaatgctttgtaaatagttgttatattgtttgtttgttttcttaacgttttttttaatggttgtattgttattgtttatttaaaaaatattttcaattcaaggttggctgaatctgcatatacagaacctggggatacagagggctgactatatcatacacattagatttcaaagacttagtatgaaaaaataatgtaaatatctcatgatttattttgaatatctgttgaaatgatatttttgatatattgggttacataaaatatattaaaattaatttcatctggcttttcctttttaaaacgtggctactagacaatttaaaattatatatgtgactggcattcattagaacttgacacctctctcaggaggaaaggtggaaggaactggtggatatcactgtgcagatgaggtgatatgacagctgccttcagctctttggatggctctcattcgtaaaagagattctttctgttctgtgtttctcaaaaggtcgaacgaagacatagaaaaagcaagttaatgtaagatagacccttctaaaatagttgtccaaagaaaatataggctccttctagagataatgaattccttgtcactatacataattcaagaagaggctaaatagctgcttaatgaggttgtttagagggagatcaggtggttaaaagtaatgcctttccaatcctgagaatttgtgacttgatgaaattgggcaaagggctgattttacagctacatgaaataaatggattccgtgggcaggagaagaaagcattttatttcactccctgtgcttttcctttaaactttcacatgagtattttccagttgaggagcttttgcattcttggttacagaaagatgtttgattgtctaatcccagggaatctggtgaacagtgtatcagttaggaatgtgcttggcaacaagtaaacaaacaaacaaaccaaagtgacaatggcaaataagtagagatttattttaatcctgtaacaagaactctggaggtcagctgcttctggcattgattcattggctcaaaggcatcagagcgagtgtctctgctattctcttggccttccttttcctcgtagtagcaaggcagtcacagctaccaacagcacatccgtaaggctggaagaggcacggaagttgctcagcccctactgcgtctgtcactttttcttgggaaaagaagtagtctttccagaaatcctcaacacaattcctcttctgattcattgggcagaattgtctcatggccactccttggtacaagggaggctgcaaagtgaatgtttgctcttctagactctacgattgagacaagacaggaggagaaggaggttgggaatggcatttgtgtcagccaaaaagaacagggtctgccgcagatagttttaggtgtgactgagggcaccactcccaagtcaaacatcaagtgcttgggagttgagacatcatccaatgtcctttttttattaaaaaaaaaattctttcactaagtggttttagctgccattgatgattgtagccttggatgagttttattaaacaattctttctttttagagaagaaaaaattgaggacccgagaagttaacgcctttgatttctattgaaattactcatagggtaagagtgagagttcttgctttgccctttccaccttcctgacttcatcagcaaagaagagaatcttggttttatttttcattatctgcaaatgatatgtccataacagtagttatttgtcacaaaaatacttcacaagaacattggtaaacacatacaaatgttagcagttctgaacaggcatttattgtagaggaacctgtttatgatgagaaatatgaaagaattgagacagtgggcctctaccatagaggagggaagaaactagttgggtgaaatttagtgttaggatgttttgtcaaaaaactatttttgggaggctgaggcaggaggatggtttgagcccaggagttccagaccagcctggacaacatggcaagattccatatctacaaaaataaataaatagaaatttaaaaaaatttttttcatctttagcattaatggcaaatatttagagctatatttaatggaagtatatgtgaattggtggtataaacagatttttccaaactctttttacttgtaatttctgtggctgtaacaacttttactagcctcttaggagtttcttaaatcctttttccccattttctttggtctatgataaagaagtaatctgaagtagaaaaaaattatttaggctgggcacagtggctcatgcctgtaatcccagcactttgagaggctgaggcggggggatcgcttgaggtcaggagttcgagattagcttggccaacatggtgaaatacaaaaatacaaaaattagccaggcgtagtggcagatgcctgtaatccaagctactcgggaggctgaggcatgagaatcgcttgaatccaggaggcggaggttgcagtgagctgagattgtgccactgcactctagcctgtgtgacagagcaagactccacctcaaaaaaaaaaaaaaggaaaaaaattacttagatgagctaatttttgaagatggtcttataaagtttattttttattaatacactttattttttagagcagttttagattcccagcaatattgggtggaaagtatgaagaattgctatatactcccttcccctgcagatgcacagctcctcccactgtctacagttcccaggagaggtgtgacatttgttatcattgatgaacttatattgacacatcgttattacccaaagtccatagtttaccttagggttcattcttgatattgtacatcctatgggttgggacaaatatataacgacatgtatccacatttatggaatcatacagagtattttcactgccctaaaaattctctgtgctcttgattgttcatccctccttccacacaacccctagaaaccactgattgttttactatcgccatagttttgcgtttctagactactatatcgttggaatcatgtagtgtgtggcctttgcagattggcttcttttacttggcaatatgcattgaagttccccccatgttttttcatgacttaatagctcgtttccttttagtgctgaataatatcccattgtctggatatcaccgtttatttatccattcacctactgaaggatatcttgaatgctccaagttttggcaattatgaataaagctgcttataaacatctatgtgcaggttcctgtgtggacatgcattttcagttcatttaggtaaatatcaagaagcatgactgctggatcatattttaagaatatgtttagttttgtgaagaattaccaaactgtcttccaaagtggctataccattttgtgttcctaccagcaataaatgagagttcctgttgcatcacactataccagcatttggtgttgtcagagttttggattgtgaccgtctaatgggtgtatagtggtatctcattgtgttttaatttgtgtttccttaatgatatatgatgttgaacatcttttcacatacttacttgccatctgtatatcttctttggtgagatatctgtacaggtctttggccattttttaaatcaagttgttcattttcttgttgaattttaagagttctttgtctatttttggtaacagccctttatcatatgtgtcctctgcaaatattttttctagtctaactcatcttctcattctcttgacagtgcctttcacagagcacactttttaattttaatgaaatctagcttatcaattatttctttcatggatttctgcctttggtgttatacctaaaaagtcatcaccatacccataataacctagattttctcctatgttatcttccaggaattttaaagttttgtgttttacatttaggtctgtgatctatttttaatttttttagagtttcgctctgttgcctaggctggagtgcagtggcatgatcttggcttactacaacctccgcctcctggggtttaagcaattctcctgcctcagcctctcaagtagctgggactacaggcatgcaccaccacatctgggtaatttttgtatttttagtagagatgggatttcaccatgttggccaggcaggtctcaaactcctgacctcaagtgatccacccaccttgggctccccaagtgttaggattacaggtatgagccgccgcacccttcctgtgatctattttgagttaacttttatgaagggtctaacatctgtgcctggattctttttgtttttttgcacgtggatgttcagttgttccagcaccatttgttgaacggactgtctttgccccattgtattgcttttgctccattgtcaaagatcacttaactttgtttatgtgagtttagttttgggttctctgttctattccattcatctatttgtctgttcttctaccgatatcacactctcttgatgactgtagctgtacattaagccgtaaagtcaggtagtggcagtccttaaactttgtcctttaacattgagttggctgttctgggtcttttgcctctatatataaactttagaatcagtttgccagtatccacaaaatagtgtgctgggatttttgttgggattgcattgaatctatgaagttgagaatagctgacattttgacagtgttgagtccatgaacatgggatatctgtttattcaattcttctttggtttctttcaccagttttgtggttttcctcatatagatcttgtacgtattttattagatttatacctaagcattttgatctttgggggggtgctaatgtaaatggtaatgtgtttttaatttttaatttcacttggtcattgctggtatatggggaggtaattgacttttgtatattaaacttttattctgaatcttcttataattgcttattagttccaggaatttcttgtttattcttttggaattttctacatagacaatcatgtcatctgtgaagaagacagttttgtgtcttccttcttaatctacataccttttgtttctttttcttgtcttattgcaccagttatgacttccaatttgatcttgaaaagcagtggtaataacggacatccttgcctggttcctggtcttagtgggaaagtctcaattttctctctttttttttttttgagacacggtctggctctgtcacccaggctggagtgcagtggtgtgaacatggctcactgcagccttgatctcatgggctgaagtaatcctgccacttcagtcttccaagtagcttgaaatacagatgtgcaccaccatgcctgactaatttttgtattttttgtagagatggggttttgtcatgttgcccaggctggtcttgaactcctaggctctagcaatcttcttgcctcagcctcccaaagtgctgggattacaggtgtgggtcactgtgcctggctgactttctcactgttaagtatgatgttagctgcagggtttttaaaaatatgttttttatcaagttgaggagattcccttctattcctagtttgatgaaagtttttattatgaataggtggtgagttttgtcaaatgatatgatcatgtgatttttctaattaagtctgttgatgtgatggattagattacatttattgattttgtatgttgaaccagccttgcataattgggataaatcccacttggtcatggtgtataattctttttatacatttttagatttgatttgctaatacttttttgaggatttttgcgtttatgttcaagagagacattggtccatagttttcttttcttgtaatgtctttggtgttggtattagggtgatgctgacttcatagaatgagttaggaagtatttccactgcttctagtttctgaaagatattgcagagaattgttacaatttcttccttaaatgtttgatagaatttatcagtgaactcacctgggcttggtactttctattttaaaggttattaaatattgattcaaatgtttaatagatgcaggccaacttagattgtttatttttgtgtgtgagtattggcagattgtgtttttcaatgaattgttccttttcaggtatgttatcaaatttgtgggcataaagttgtttataaaacttctttatccttttaatgttcatgggatctgtaatgatgttctctttttcatttctgatattagtaatttgtattctgtctccttttttcttagcctgtctagatgcttactgatttcatctatcttttcaaagagcaaacattgctttattgattttttccattgatttcttgtgttctctttcgttaatttctgctctaatttttatacttttttttgcttttgcttactttggatttaatttgcttttctttttctagtttctaaaggggaaaacttgggttgttgatcttaggtctttcttctttcctaatttttgcatccaaatcctatgcatttccctttgctttagctagaaactacaaattttgataagttgtttccatttttatttagttcaaaatatttttttaaattatcttgagaattctcttacccctatgttacttagaagtgtattgttttatctccaagtactttggaattttccagctatgtttttgttattaattttttatttaagtccattgtgatctgacagcagattttatatggtttctatatttttaaatttattagagtgtgttttatggcctaaaatgtggtctatcatggtgaatagtccacatgagcttgagaaaaatgtgtaatctgctgttgtttgatggaatagtctatagatgtcatttacatacaattgattgatgttgagtttatgtccttcctgattttttgcctgctagatatgcctatttctgagggatgctaagcctccaaatgtaatagtggattcacctcttttttcttacagttctatcagttttacctcatgtattttaatgctctgttgttaggcacatacacactaatgattgttacgtattcttggaatattgacccctttatcattttgtaacgcctctctctatctctgataacctttcttgctctgtagtttgctatgtctgaaattactgtagctactcccacttgcttttgattattgttagtgtggtatagctttctccaaccatttaaatctacatatgtctttatatttaaagtggactttttgtagaccacatatgattgggttttgttttttgatctaccttgacaattcctgtttttcaattagtgtgtttagaccattggcatttgaggtgattgttagttgggtatatagttggatacctaccatatttgttattgtgttttatttgttgcccttgttttttgtttctatttttatcttccacacttttttgccttttatggtttattatttagtattaaatcattttacattattccattttctcttttgtaacatataaagtatacttgtttttaaaaattatttgtagaaatgaagtctcaactgtgttgcccaggcaggtctcaaactcatgggctcaaacagtcttcccatcttggcctcccaaagtgctgggattaacagatgtgagccaccatgctcctttttttgtttttttaaacttttttaaagtggtttccctagaagtttgctgtatatatttacaactcatccaagaccaatttcaaataactctgtactaatacatgggcagtgtatttcattataataatgaaatattcctaatttctccctcctgtcttatgctgtcattcatttcacttatacgttagtgtatataactatatgtgtatgcacatacacaaacacacacacatatatatatacacacacagccctccatatatgtgggctttgcctccatggagtcaaccaactgtggatcagaatatttgaaaaataagggataattgcatctgtactgcacatgtacagatgtttttctcttgtcattattttctaaacaatacagtataacaactatttgcatagtattaggtattataagtaatctagagatgatttaaagtacataagatgatgtatgtagattaaaagcaaataatgcatcattttatataagggacttgagcattcatggattttggtatccactgggggtggggccctgaagccaatctcccatggataataagggactactgtacacataagcatacataaccaaatacattgttgccattattattttgaacaaactttgatctgttagatcaattaaaaaaataaacatttttgttttacctccacttactccttcttgatgctcttgttttctttatgtagatcttatttctgacctaacattattttccttctctcaaaagaacttcttttaacatttcttgtaaggcaggtctactgccaacaaactctgtcaatttttgttagtctgagaaagtcgttatttctccatcagttttgaaggatagtttcacaaggtacaagaattctaagttggtgggttttttcttttcctctccacactaaatagttcactccactttgttcttgattatgtgatttctgagaaggcagatataatttttatctttgtttctctatagccaatttactttttttctctgatttctttcaggaatttttctttatcttttactttttgtagtttgaaacgatagcctaggtatagtttttgttggcatttatgctgcttggtattctctaagcttcctggatctgtggtttggtgtctggcattaatttgggggcaattctcagcctatattgtttcgtatattttttctgtttctttctttttctccatctagtatttccactatacctatgttaaaccttgtatacttgtcccacagttcttggatattctgtttttcagtctttcttctctttgcttatcagttttggaggtttctattgatacattcttaagctcagatattctctccttagctatgtccagtctactaataagcctaccaaagacgttcttcatttctgttacagtgtttttgatccttaacatttttttttcttaagatttctatttctttggttacattgcctatgtgtccttgcatgctgactatctattagagcccttaacaaattaaccatagttgttttaaattccctatctgataattccaacatccttgtcatgtctgtttctgatgcttggtctgtctcttcaaactgtgttgttttgccttttagtatgccttgtaattttttcttgatagctgggcatgaatatggggtaaagggatcactcttaagtaggcctttagtaatgtagtgatagaagtgtgggaggagaggaagtgaaaccatctttgcaaaaattatgaccatgagaaaaattttggcataggaaagttatggcagtgaaagaaatctaacctaactgactccatgttgcttctcacctccaagctgttcctattcattcctgggcataggccaaacaaaatataggaggaatttactttatagtttaattttgaagcaaagatgataacagccccttcctgagacaaaccccctctttgcttagggattagaccatctttgtaaaactgaaacgttagccacaagattagaaattctggctcaggagtcatgtagccagaggccacaagattcctaaacttcccaattgctcctatagataacatcactattgtaaaacctaagattggtgtttgaggtatttttctgaccctgcattctgatgaaccaaccagctggtgccacccagactggtaaactggctcatctggtcttttggcccgcacccaggaactgactcagtacaagaagacaaacttcgactccctatgatttcaacccaaccaatcagcattccctattcccgaccctgctgcctccaaattatccttgaagaaccatagcctctggatttttggaaaggcatatttgagtaataataagctcctgtcctcttgcttagctgcctctgggtttattaaactctttctctattgcaaaaacctgctgttcagtgcatcggctttgctgggcagtgggaatgatgaaactgcctggtgaatacagaagtgttctcttgtcctatgagtaggtctcagtctttgagtaagcctgtgcctctggactgtgaacttcacagtgtttctcaggttttatttcctcttaggtgggacagggtcgctagactcggctggaattatatgtttctgttcatcacatggaaggcttgagtgggctagagctgagaatttctcttccctccaggcccgttaggctgtgggaaaatccactgtcagatgaggctctggttaggtagcttctcctgaggacaggccttgttaggaagaccccagtgctctggcatatttcaaaatggttccttttccttctcctcctgctggaaagggatttttcttggggaagtttctgctccaggccgggtgcagtggctcacacctgtaatcccagcacttactttgggaggccgaggtgggtagattatttgagcccaggaattcgaggccagcctggataacatagagaaacccagtctctcctaaaaatacaaaaactagctgggtgtgtggtgcatgcctgtagtcccagctacttgggaggctgaggcgagaggatcccttgaacctaggaggtcaaggctgcagagagccctgatcgtgccactgcactccagcctgggtgacagagccagaccctgtctcaaaaaaaaaaaaaaaaaatttctgctccagtatgttgtgattctctgtatctgcctgtctgttgcttcaatttcagaggcatcagtttaccttgtgatctcacttttcttacagaactaagaagacttgttgatttttcagtttgttcagcctttttacttgttaggatggagtggcgacttttcagctccttaaatacagagctggaaaccagaagcctcttgacttttcattttttgcctttgaaaaaagtcaggtagttaatacttctctttcagggtgctgtttgaaaattctgttatgcaaaaacataatgtagataatttgtattcccaataaatgataaggcacattggatataattgttactgttttgtattttttagcatagttttagatgttttattttgctacaaaggaattttgagcagaagattgtgacatatatctgtaaagaacagacttattattattattattatcattattattattattttgagatggagtctcgctctgttgcccaggctggagtgcagtggcgcgatctcggctcactgcaagctccgcctcccgggttcacgccattctcctgcctcagcctcgcaagtagctgggacttcaggcacccgccaccacgcttggctaattttttgtatttttagtagaggcggggtttcatcgtgttagccaggatggtctcgatctcctgacctcgtgattcgcctgccttggcctcccaaagtgctgggattacaggcgtgagccaccacgcccggcccagacttattattttttatgttcatccccctgttaattatctttcactcacaatattccctttgcttttcctttttaccagtggtccagtatgggtatcagtggaacaatatatgtcttaagaataaagcaattttaaaccaccatgactagtagcagtgtttagctgagttctgttgcccagttgtcaccaactactgcatatactccctagatatacagttgcatgttctcacactgtcctgttttgaagaaaaaaatgtttttaaaaagtagaaattgaaccaaatgccattactgtctttattgacttgaaaggccctcattccacccaatcctgccctactcctcttaccccaattcctttgtgaactactttgggaaatgctgctggtggtggtgtgtgatgatatttgtaagagcatgaaaataaaaagctgggaatatataagagattcagattttgctgaagcagagaatttgacttgtggagtattgtaatgcaaaatttggtgcactgttaatggaaagcatttgctatattaaacagtaagggtctattgtaggttgagaagctggggagatttattttaccatttagcatgtagagaatttgaataggaaagtaggtgtgtatagagtgcctgtttgtcccattcattgttggggtttatatatacctttctctcttaatcctcaaaactccctgcctgtaatgtaggtattttccccattttgcagataaggaagctcagacacatgaacttttccaaggtctcaaagctagtacatcgtggggctgtattcaaacccagggctgacttcaagacctattattcttctactgaattaacctgaatgcttgcaaagtctgtggctctaattgtttctgtggctaattaatgttcatgaactggtgaagagtaaatagtttagttttttttttttttttttttttttcttgagatggagtttcacttttgtcaccctggctgagtgcaatggtgcaatctcgactttctgcaaccttcgcctcccaggttcaagcgattctcctgtctcagcctgccaagtagctgggattacaggcacccaccaccatgcccagctaatttttgtattttgattagagatggagtttcaccatatgggccaggctggcctcgaactcctgacctcaggtgatccacctgccttggcctcccaaagtgctgggattataggcataagccccagcacctggccaatagtttagttttttaatgactccctcaactttgttaggtctgtttatttgagagcatgtatttatttggggccataaatgtatttttacatttacctattttatttatctcaggtcttgctttttacattagagaaggaagctttactagtactctacttggaggggtacatctctttatcaggaaaggatcttattcagatatatacatacatacattgtatttatttataaatacaataataacactgaagtataaagaaccacaatttattacttttttcctcattttttttttctgctgtggagcttaccagctagaattctggttttggtagcaggaaagaacaagtggcaactttgtgaattgtggcatttgagattagacggatatacaagatggtgtactacagcactctaacagaagggaatagcactgttgtcaaagacattggaaggtctcttgtaactgaaagagccctctttggcatttggccgtctcagtttcacgataacaagacgaagcaggaaccttgaaattgctcctctttgtattccattcctggataattaccatctatactcagatttcgaaaggtccttttattttatgattgcatctttcagcaacaactattattatcctattatgcaatttgccttatttatgatgctcaggtgggaaaacgttcagactccacaattgaaaagatcgccctgattgagcattttgtggtgcttttgcttgttttgctgttgaacaaacaagagttcaagacaggtgaattttttccagatgtgcatttgaataattggacagatccctgtggtctcttcagtaataacacaagtgactgcttattgtcgccttcttcctccatgcctggcttcctgtggtcactctgcaaagggctctgtagttgcaagatgactccacagttaatattgagctcatgaggagtaaatagttcatccaagctgggaatctctgagcttcattaggtctgcttatttgggtaccagaacctgtcactatccaggagacacacagcagatcagctttcacttgctttgttaccattttaggcatgaaatagaacgattttctcccagaacatgatgtccctgtgaagtaataagtgatagcactttatgggctttaaggaatctagagccaggccagttagcaactgaagctgtagtaactcagctggacactgatgtccttttcctgaagttatatgagcagaggcatgtaagggaaatgtggctcggtgacccacagtgctcagtgcccagttcagtgacaggcagccaggagagctgagccatggagaggccagcaagccaaagggatttgctgccatgctgtgacatggaaggcagggtgcactcagcactgtattgatgacgttcttaagtctgaaggacttaatgcagtttctggatgtgcctcctcatcaccacacctgttcaagggggaaactgggacccaccccaagagtcagctctatagaagtttttcctgacaatactctctactcctggaggtagactgtgtttttctcctgtactctcctctaacacagaacttgcgtgttactatatgcaacttgtttatctgccccctggactgtgaacccttgaggacagggatattgtcttatcactctttgaattctcagtgctgggtacatattacgtgttcaatacatgtttgttaaataaatgaaacagtcacgtttggctcctttcttccacaaggcattctacccttccacggaaacaattatagcagcatggaaacaattacagcagctatctataattgataatcagaactaatgaaatatggtagcacaggcatgaatagagttgaaattatcagagtgattataaaatacataggaataaacttaacagaaattgggcaagacctttatgaagaactcttccaaacttaactaaggcacataaaagaacacttgaataaatagagaaacatgttcattggtgaaacgagtcaatgtagtaaatacgtcaatatcactttttgtccatattaacctaaaatttaatacagttccagcataagctgtaatgttatttttattctatgaaatttgataaaatacggtaaagttcagaaaaacattgcctgagactagtgaagaatgaaaaagaggggaaaattttatctcatcaagtattaaaacataaaatatagtaaatataaacaaaatggtagacaaactaagaaattggaagccagtataatctggataccaaaacttgacaaaggcactacaagaaaaagttatagccttaagcatagatgcaaaaatcatcaacaatatattaacaaatggaatccagcaaaacagaaaaaggataatatatcattaccaaatgggatttatcctggaaatacaagggtttagcatttgaaaatcaatgtaatttattgcatttattgaaataaaagagaaaataagagcatagctacaacaggaagtctagaagcaggcttgagtatacatggaaacctagtacaggttcacagtcctttatctgaaatgtttggggccagttatatttcaaaatttagggtttttagcagtatctcataatcaaattcatgtaaatttccacagcagaacagattaatacggacactaaatgggatgataaagaccagaaatagcctcacattagctcaggtcaagttttgccaccaaatgaatttaagcaccaaaccgcaaaaaacaaaagactctgttttcagagctttatgatttcagaatttcaggttaggaattatcaactctttaatgccagggtggcacatcaagtcagtgatgagatttgtaaaaggcattgggattacatactagtcatttagaggaagaaaaggataaagttaaattcctacttaatagcaatattgtttatgtttaaagattttatgttaaaaaactaaagaatctataaaagcacaaaatatatacttaatctttatttataatcttgtggtagcagagatctttgtaagcatgataccaatagcagaaactaaataaattttaaaaagagatcttacagccagccacggtggctcatgcctgtaattgcagcactttgggaggccaaggcgggcagatcacctgaggttggagtttgagaccagcctgaccaacatggagaaaccccatctctactaaaaatacagaattaccctggcgtggtggtgcatgtctgaaatcccagctactcgggaggctgaggcaggagaattgcttgaacctgggaggcagagattgcagtgagccgagattgcgccagtgcacttcagcctgggcaacaagagagagactccgtctcaaaaaaaaaaaaaaaaaatcttagattactaagcaaaaattacaaagaacaccataatattaaaaactaatgtcaatgtggagaaaatgttggctatatatatagtggccaaagggttattgcccatagtttataaagagctcttacaggttaataaataagagatgcattctccacgacaaaatcagaccaaagatatgaaaaggtaatttgcaagagaagaaatacaaatggccgctgaattctttactactactatatcactatcactactactagcaggtaccatttactgtttattgtctgccaagcactgggctagtatcatatcttgcttaagaaaatactatgagacaggtgcaattatttacattgtgcaatgaggacagtccaatttagggagctaaagcagcttgtcctagatcacacatttagcaaaactgttgcagcccagggctgtctgcctctgaaattcttgctcttcagtataacacggacctactgctcctatatatcagtatttgtataaaaagaaaattcagtgaaagcaaccagaagttaccatttgttttgcctattagattggcaacaattgaaaaggaatattcatagccagggaagatcagagtgtgaagcctgcactctcatatattgctgctggtagtgtcaactggcatgatttttctggaaggcactttggcaatatgtattgaaagctacattctttgatacagtctttctacttctaagaatttgtctgaaaggactaatttgataagtgcttatatgtaaacagtgttcatttcagtattgtttataaaagcaaaatgttgaaagaaacttgtccatcagtgaaagatgggttaaatgagttatgagagaattgaagatgtagagctatatttattatttaaacattgaccttcatttacttttttttttttttttttaatggagctttgccctgtcactctggctggagtgcagtggcacaatctcggctcactgcaacctccacctcccgggttcaagctattctcccacctcagcctcccaagtagctggaattacaggcacatgccaccacatctggctaatttttatatttttagtagagacggggtttcaccatgttggccaggctggtctccaactcctgacctctcaactgatctgcctgccttggcctcccaaagtgctgggattataggtgtgagccactgcacccggctgaccctcatttgctattggatggaaaaataaaataaaacaaagcatgttgcaaaacagttttgtggtgcaactttatatttgaaaaactccaagtcatatacacatatgccaagaaaaaagtctggggaggctgtgaaacacagtattgacagtggtataattattagtgttttatttttttcttcatatttttctgcagtatttattggtttatttttgctctatacatagactccagttgaaaaaagtatttaaaaatatatactataattttctcagactgatagaacatctcaacttgaagattaagcacagaatttggggatgttcatccagatctgtatatttactttgcttttgttagggagtatgtaggtacttcctgtacttatattttactttttgaaagttggcacaggcatgtgctcacacatacattatttcccacatgttagtccaagaattgccaggcttctatttcaatgactgtgtttaaagtaatagtttgccagcgacttggtttacatatccaatcagtgtgaaagttatgtatccttctccatagatacaaggaagtcctctttgcccaatcagtagatcaagaaggcgaacaccttcttaattacaaatgaggttttaaaaagttggcttaacaaatatagctatgtttgcttaacaaatatagccatatagcttaacgagtatagctaaggagacctacctgaggattcttctggtttagaaaagaattatttctgatagggagacaatcatgttgggtgtattttaaaatgcttgatataatcttcaaaatttattatgaaacagtgaaatctggccgagtgtggtggctcacgcctgtaatcccagcactttgggaggctgaggcaggcagatcacctgaggtcgggagttcgagaccagattgaccaacatggagaaactccatctctactaaaaatataaaattagccaggcatggtgatgggtgcctgtaatcccagctacttgggaggctgaggcaggagaatcgcttgaacgcaggaggtggaggttgcggtgagccgagatggcaccattgcactccagcctgggcgacaagagtgaaattccgtctcaagaaaaaaaaaaaaaagaaagaaagaaacagtgaaatctagtattttatatgacatgagcaatttgcacagtgactttgaacattatcctgaccatcaaagaacattatttaataagaattgtggactaagtaactttagtgtgcattttcagtgtctctaaagatttgggcgcagagttatgagctccatttggttgaactggtagttttagaaacagatttttaaattacttaccaaatgtaaaaggaaaacacttgtattgaaaacactggttgcagatcgttctaaaggccatttgggacaacagaacaaggcaacatctcagagaaaatggttagtaatgggctcttagagatggtgtcttaatgcagtagttattttgaattatctttaaaatggttttttgaccctgttcttctgttttgacattctcctttgaaggcatacaagttatactgatgatatttgaatagtggaactcttgtgtagcagttaagagggtgcattttagagtcagacagacctgggttaaaatccaggctctaccacttagtcgttttttgagctttggcaagtcactctagtctctctaagctttagtttcttcatttcaaaagtacagacctgacagagttgttgagaggattaaatgacataatttttgtaaagagcataactgcctggcagattaaatgttcagtaagtggttgctcttttttcataagtagtccaatttcttttagaagattttcataataatatgtagtgtaatggaaagaatgcacactgtcttgtctaatagacccagatttgaacactggttctgcccttaacaacctcctaaccttgggcaaatcattctgctctgtgcctcaattttcttccccaagaaatggagtcataatgctgacctttttaggggttgtaaggatttgaagtgatataggctaagtgtcaaactctatgcctggaggaaagtcagtattcaatgaatggttactatcattattgttataaagctaataaatatcaaagaacatgttaaggcttttaatatttttcctcttctcttttttatctttagttgtaattctttaagaaattgggtacacatagctaagactgtgcagtataagaaaagtgttaataagttatataaaaatgtattctaatactacatttggtaaacaaagaataagaatctgtaggtagggattatatgagtggagaaggatgtgtacttagggcttggctttggggtgcgtgtcagagactagtgtatgaggaagaagaagcaggaaaaggcagtgtttcatttctcacaatcgcccctctcaccagccacactgaagaggtgatgtcatgggcctctgatgctgtgcttgcccccatcacccagccgtctggaatagctgctggaggtgcccagtgtgccagcactgaaggaaggcctggctgcttggcaagcattggtgatgctgtgacattgagttcctggggaggctgcctgctcaggtggactgccacatgctgtatgtcttgcttcatatttgcacaatatggtgcttgatgtgattcattcatccattcatccatcctttgtttttttttttttttgaggcagcatctcactctgtcacccaggctagactgcagtggtgatcaaggcccactgcagcctcaatctcctaggctcaatcgatcctacaccacagccttctgagaagctgttactacaggcatgcgctaccacaccctgctaaatttttatattttttgaggagacagggttttgccatgttgcccaggctggtctcaaactcctgggctcaggccatctgtctacctcagcctcccaaggtgctcggattacaggcgtgagccacctgcctggcctgtccatccttttttcccttcctccctccttcccttcctttctttttttcccttcttgtcttcctccctcactttcttttatccagccatccgtctgttcatcagtccatccatctgtccatccatcccatccatccgtccatccatccatccatccgtccatccatcttctaggtcctaggtatagtagtaaaatagtcaaagtcccttccctcaaggagcttacattttagagattcaaagcattttcaaatgtattatttcatttgctttttaaaacaagtatgtgaattttgaattttttagtattttcatttgctagatgaggaaacaaaaatattttgagattaaatgacttacttgggataataatgctatgaataaaacccattattttttatttagaactcttttatctataccacttttgtattctaaacaagtttttcattaatgaaacatgttttcacactgtgtttttctcaatacttcaatcataggtagccaagggaattttaaagaacattaagtgcactcaactgagctgctttaacctttcaatatgttcccgctgctcttagaatgagatttgaaatccagaacaccactgcatcatcaggccagtgcttccttcccagctctgtctccggaccccgtccctcgtattgcctgtcttctgcaaatgctagccttctttcctgacctcagaggtattgtgttctttccagcttcagccctttgtatgcactgttccctcagcttggaatcctcttctctgtttccctccttgtccgtcttccccctatcttcaccaagctaatcccactcaactcacagatctcagctttcatgccacttcctaggggaggccttcctcatccccctgccaaggttaggtccctgtaccatatgtgctttctcatagcaccctgtgattttccttaatgactcacctatcacaatccaggattttgttgactgtctgcctccccttcctgtaaaggttagagggtaagctccatgggggcagaacactagttatgtcattttcaccgctgtttccctggctagcactgggcctcctgtaggccctccaaaatatgcaaataaatgaatgaacaaacaccctggcagcatggaaacccagagcggcacaagcgagttcaaatgcttatggtttgttccatctcacttccctctaggatgtgattttagcagtgtaggcagcttacgaaatggggcaggtttcttgtgttttactaatgtgtaaataaagatagagtaactcttaagatatggaaagtttgtaaagtggcagcaaaaagtgacaaggtgtggggatccaaatacagagcctagggaaaatagaataaaccaagttgtttttatgtctcttttccattagactgtgagcaagctgaagtcgagtcccagaacttatttatgtttatatcctcaaagagactatagtgcctggttcatcgtagctgtggaataaatgttgaatgaatgaatgatacacctcttacctttgaagctgacttcttgtgttcttcatgctgacattagaaataggaaaagtcagtcgagtacagtagttcaagcctgtaatcccagcactttgggagaccaaggcgagaagatcgcttgaagccaagagtttgagcccagcctgggtgacaaagtgagaccccatctctacaaaaagaaagaaaagaaagaaattggaaccgtattatttgtagaaaaaatactagatctagaaccagagacacctaggttaaaactgatttaaaatgagaataattattcctaccaagtggagttgttgggagggtggtatacatatagatggtgtatataaagtgcatagcaagctggttgtggtggctcaggcctgtatttccatctagtaggaggccgaggtgggatgatcccttgaaccctggaggcggaggttgcagtgagctgagatcacgccactgcactccagcctgggcaatagagggagactctgtctcaaaaagaagtgcatagcaagcaccaggcacatctaacagctcctcagaacatttaagctcccctttttttgcttctttccctttggtataattttagaaagacttttggggagcatgacatataaatcattaaaaaagagagagcctcaaagcagaatcatggcaattgagctagatttgtatttatcaaagcaagcatgatgctgggatgcttaaataacagtacagtacattgcaaaggaactagggaataatgttcctattatttttgtccatggtcagcctattactagaaaagagtgaccacattgatttctaaagtccttatattcaaaactttctgtgctgaccaccatcatttatgtttttcccatctctacttaaaaacgtcaactagccccaacttttcctctagttatttcttttattagatttattctgttctccacaataaaatctatcttctgttcccatccatgacaattcaagtagttataatgggtggatatagggtatgataaatgttggtaaatccactgagttccttgagttccacattgatgtcttttaggatgtgactaggggtaggctaaatattttctagtttctcagatcctacccctggtctaattatgatatagaggccagattagtgtcaccagtttttctttctcttctgaatgtagagcaagagcaaatgattgcagataacagcatgagaaacttaggatcaaccaccagcatctaagtgagtcttgtactaggctcattccagttaaaagctgtaaatcatttcatagccacatcagtttagttctcttttatagaactcattatgtgatacaaaatatgcaaggcactggagatacaaatacaattatttcctcaaggaactttgagttgagcaaacatggtactgtctggtgagaccagacatatgagcaaacatagtacttctctggtgagaccacatagagaaatgtacaaggggtagaggaggcagtgatgactactggtctgggatagttgagggaaggtggcataggctgcctattgaagaataaattagagtttgctatgtgaacaaggttgcagagggaatagtatatggaaaaacagggagatgtggacccatatattttgtgcagagatgtccaagtacttagatattactatattgcaagtatgaagaaagctttttttgagatctgacaatgccaaggtaggttatggactctctttggagtccccaaaataaaaataaaacattcacatctgctaaagatagcttgaatggtatttttgctaaaggcagagtcatatactgtatgtgccagataaaagtcaatgtctattatgtaaacattgagattacattaattaatttaaaagaaaggattcaaacttagtactaatctgcatctggagaactaatctggtatgtgttattttcaagtcacccaactaaagcagtctgttgtatggaactctgctccctcttagtcaaacaaatgcaaccataaaaagcagtgcaaattcagtgtcaccttttctccatgggattgggtggtttcttttggagcagagagagtttccagagaatcaatatagtagccagaagaaaagtggagggtggccttaccttgtccactccgtgctgcctgagggtgaaatggaacctcggatgttgtacacctttaaattgtccatgttgcctgtttcatagccttcccgggccagggagctgtgtagtcagtttatagttctaagaaccagagcaggactgctgtgcttgtaattgcatgctttttatggaacaggcaatgttgtttagggaatttgggcagctggaacctgccacattagcaatttggactgaggaagaatttcagggtgataaaataaagctcattatataaattcacttgggtatttaggaggctgagaagggagaggatgagagtattccaaaggcaagcaggagagtttcataaacaggtccctttctattcgtttttactgtaagtgttgaattgagctaggaggatcacatggcccattttgcaaagggcagtcatgttctgctgtttcttagctgttttgtcagttggaacaaaacaacagcgctgctcattttttgcagggttagaggaaaaaggaaggactggccgaagaatggggtggggagctggagaagagaagggccaaaagtgtcagactgtggggatgaggacctgaaggaggcccatgagacctcaggcatgggccctggaactctgcctttttgaagcctgttgacaatctcaccctaatttaaccctttgtggaattcttccatgagatgcagttgccatcatcaggcttcctagagaattgagcctgcccactctgttatgaagtctacccagaagagctggcagagtaggccccttcactgggactgcagcaacactgaccaaagcaaatccttctcttggaagaaacaaactcattcctcacacctgcctcaccccgctcccaccgccaccccctgcaccacacgccagcccttaataaaaactaaaactgatgtcattgtaacctttggttattcttttttgtgcgtaaagtgtcaacctcctgttttattctcataaataatggaaatcttaacttcatttcagaaaatcacaaaagataacagggaccctattcaaacagaataaaaataattagtaagtcacaaactctgactagaaagaaaaagagaagagagagagggaaggagaaagaaagaaggaaagagagggagagagagaaacgaggaaaggaaggaaggaagaaagtgaaagaagaaagtcctcttgttggtgttaaaatgtgtctttaaggggaaacttatcatttaggttactaatggtttctttcttcatcattttaatttccattaataaaatgtgactttgaaaggatgcagggagtttgggaatagagagttttatttttatttgtttattttttttccccttctcccagcaaaatacacaggtatctgactatgtagagacacgaagccacctatcctgaccaaacttggcagtggtcaggggataggaggaagtgtagtgccatgggatgggcaccagccctgatgaactcgactttctttccatttctctcctgcatccaaatgttgaggagactttgagtagtagtgtagcctcttttccttttaaaaatctgcaccctgcttatttccaatacagatatgaggttggtacccactaatcttaacaggatatatatatatatatctaaagtatataacatattatttaaaaactaatgtattatttaggttttattaaattatcctgtttttaggctatgctgatgggctaaatttgcctaaactcctgagatttagattctcatttattggcattagaggagttcctaaaaaaaaaaagctattaagattaaatatcataaaaatctttctaggaaaatataatcaaaagcatcaaggctgtctcctacagttagtggtttctattattttggttctcagagctatgacaatgtcactggatttcaagaattcagaaagacaaaaagaaaactcataattttgaaatggggaaagggaaagatcttggacatagtcttctgtttttaaaatagtcattctcattttaaaataggaaaaaaattatttttcatttaacaaagcaaaaaacccagtctgtacttttaaattaatgcaaacatcaatattttatagggagaacattaataatcattgtggagcccattaatcacaattctgcttttgatttattgtaaatatgcctcccattttcctcctcattaccaatcaccttctttaattataagagggctttcattaaaacttttgaatcatttattttggagcacctaactttagaagacatttattgatttttatagcataaaatacaaatgtttttattttagaaaacatcataaactaaaactttattggaggagtttggctaaagattcaaaaatatatagaagtaaaaatatatttaaaactgcacagtttttacaacagcatgtatggcatttggattcagaattttaactagcagtaacctcatctgtttagtaatgaattttaaaatagaaaaaaaatctgccaaaacagaccagttgtttattagctatttaactttgatgagctgaaatgagatagtgaagcagaataattagaacaactttttttctcaacatctaaatatttctctttttcattaacatttcagttaagtttgaagaaattccaaaaatgagattctcattaactaaaaggaattctaagggttataagccatctacattttttctatgacctgaagactttttttcgaaaaccaattttgggggaggattgtcagatttacctaaggttttggtttttaatttaaaaaaatttaaagaaactatcttagtgatttttgtcatcatttttatttgttgccatgattaatatatggaaataagataaattggattctatttctgtgaaagccatattcttaacatcaatgcctacctaaaaaatatacgagtcacacttgatcattcagaatcattttgaaattctctggtaatcttttaaaaagccagcgttgactagtattatgtggctagttatatttattacagcagtctagttattgtttgtgtaactatagtttttttctaatagaaataaaatgtctatttgcaggataaaaagaagtatgtatatttgatgattttgttgtagaaaatacttaataccttttaaaagctgtttgactttcggttttaaaacagctgtgtagcttggtgagtcctgcagattccggctttctctgtggcctttgagccaagtaattttttgcaacattttcctttgctttcttataaacactcaaaaattatacttgcttttcctgaaggccagctattaagttagaaagcaccaaaggtgttatgaaattgccctttattttttcgtacatcagggaggaatgatagattttgtgtatctcttgtgtgtcattagaacagaaatatttagggctgctaactcccggagttgtgtacttacccttattacagatgcaatgattttgtctgactgcattgctttaagatgagttttattgctttcatgcttaggcaaggatatttaattttatttgtgtttagagtatcttgttgtaatatacttctcccccatcttgtgctcctaaatttgggataagcatagaatccttttaagaatgtaggttattttccagtttactagaaagcatgacacatataaattagcgactaaggattatagcgtcctttcctaaaggttatcatgaaaaaaagttaaaatgtcaaagaagatcctactccagtaaaaacaatttactctgtaaaatcctgatacctcataggaagctttggatcttgttctcagctaccaaaattctttaaatatgaaagttaacatgacaggaaagtggaatacactctgtgctgaagacccactgttcaaggtgtgtggttattaatctgggtttgaatttacaaattatatggtctgattaatttgtagataggggtcggtggaggttagacgatgggctttagaacaaagaggctgataaaatactactcacaagcctttctgcttgtttgtgactctctggaaatgccattagatagttctcatagctatggtcaaaataagtaggcttagaaataaaagacattttctcccctgtaaaaggaggcggctggcctgtgctctttctaggctcttcccagagacagcaacctcggcttctgaacccttagtgctcattctatgctccaccgcgtctcctctacacgccatgatctttgttatctgatttgctagccattgttatggaaagttctcgactgtaatgcaaaaagctcagccttgggtccttgctaatgtcagcaacccaaaggcgcccctcaaaccacctcgaaaagaaaaatcctttaaaagatgtcaaactctcctttcatgttagcccaaaatgaagttcccgagcagcatctggcagagcagggtaattcaatctattttaatgcaaagattttccaagaaggcaggaagccgtcaaggagaaggctttgaggcatctgctgttttgtttccagatcccttgtgttaatttaatgtttctagggaacccggctctttcttttttctcggaatccctgctctaggaactggtgagtgcgggggcgctgtgggagctgcagataagccagcgcttggccgggcacccgcgggccgcgcagcggggcagggaggcgcgcggccccagccgccctagggcgccggctgcctctgcgggccccggctgcccagcccagcgcggggaggcggcgccgactgccggggggcgcctgcaagacctgtttatttgcatttgtccaatttggctcaagtgaaaggtaaatacggagcgatcagcttgtcctcactccagcaaaaccagggaaactcagctccatctccaggaaacaaacccaacccaaacctgagtgaaacgtaaatcttgcataaacaaacacgttcttttgcttctgggaaggaacaccggagaaatgggcattccttccgactgcccgcctcccactgtcggtaaaaatgagccgtcacaggttgccggcaatttcttgttgtgtcccgagccattccgcggatcttgttttgaaggggcgagtcaggtgtttgtgcggctccagatcctgaacaggttatgcgctgggtccttccttatcaggaggggggtcaggctgccctcccattctcatcttccgccccagaccagaggctacaccaaagttcacttttgaaaagaaatcctgcagaattaaaaataaatgtctgccctttaaaatagtttcgttttagtattatgcatatttctgtttaggaacttgtaatgctaataatttatgttgctatgacaattgtcctgcatacctaatattaaatttaatgaattaatgtggcgtatagagtaatagtaacttaactagtactccgataatgccagtattccctgtgttactaagttaatggaatcagaattttggagttacaatatagaggttttttaggccaatttttctatgggattctagggatctttttataacatttctgcttttcgaagcagtctataccattgctggagagccgtaattactaggatgctatttctttttgtttgtttgtttgagacagggtcttgctctgtcatccaggccggagtgcagtgggtccaactcagttcactgcaaccaccacctcctaggcttaagcgatcctcccacttcagcctccccagcacctgggaccacaggccctcgtcaccgtctggttaagttttgtattttttagtaaagatttggtttcgccatgttgcccaggctggtctcgaatagaacattattccttatagtaagctgaattccctgtgtaattattcttactgtcccttcaataataaaagcctaaaattattcttactcatatattttagtgagggtggtgcatgcttgaagaccgtgatgagtgttctcttcttatattcagggcaactatgatcacatattgggctccagatccttgctttatgcatcttcttttgaattgtttagaaacaatggcaaaatttccaatttcaaggtagtgcttgaaattatgcaataaaatgttatgttagcaacatttttttttattttaaaaattcctttgattatttcacacttatatcctgttctctgttatggtagttttgttttctattttatttttagtttctatgtaatttattgtgctttagctgaaatcactaaataaagataaatgagtttaacagactcttatgtgctcatttttggttcttttttgctttaccccttgtattcgttttctattacgggcataacagattaccacaaatgtagtggcttaccatatccatttattttctcatcatttctgtgggtcagaagcttggcacaggatggctctcctggcttctgtgcccagggccttcacaaggctgaagtaaagggagcagcaggcctggacttgtacctgtaggccttccaggggagaatccacttccaggctcactggcagaatttagttccatgtggtagttgtactgggggcccagttgcctttcttggagagcactaactgctggctgttaccaagggtcttctagaggttgcccatctacatcttcaaaggcagccacagtgtgcagaatttgctttagatttccctgccttcccctaatgtgtttctcttctacttttaaagggcatgtgattacagtggcccaactggataatccaggctaatctcgctagtcaacttattagtaaccttaatcacacttgcagtgtcccttcatagcagtacctagttaagtgcatgattgaataactgggtaatgggacttctcgggagagatctttgacattctgcttaccatacccctctgggtaccactttgttgtgatggtaacctcataagcagccatttaaaagagattttaagcatcttaattttgaaaattttgcaaggtaaaattaaaataaatccaagtaacatcaaatattacttatacataattctagaggtttaataaaaacaataaacattcaccataagtagttgttgcttttaaaacccaaagtttttctaccttgcaaaatcttccttgattttcttgttttgttttggtatcacaatagatcagtttctagtaccaccactatataaaataaaaataataattgcattttaaaaagaatggttttcctctgcactctgattttaaccatggaaagtttttggtatattcaaatataattctattagattccaattttgaataagaaactgggttccctgacctagctgccacttactcatatctaaaatgtacttgaatttgcagcttccaagttgggcacatgtaaaccccctcttcacttcttatagagctgcataattcttaaagcttgtggtgacgggagggcacacttgcttatacgtccaaatttactgtttatggatctcgattactgttttctacttaaattctaatttttctcattcattaattttaactggacaactattcagaagtatgaattacatatgggcaaattctagtgctttgaaattactggaaaaaaaataaatggatgatcaacagatgcaaggaacagaaaatgtttggcttttaggggagttttatgaatactcttttggacttccccacttccttttagtaactccaatgtcttccagtaactctagcaaggaggaggcccagggagagaaatggggatctcacagtctcatactaggaagctgtgctatggggaagtgactggtggtctggagatgtgaggtagaggcataggcagcaggtatgttgacacttgaaaccagtacctcctcagcccttgcgggaaatgtgataatccaatcttagccatatatctcaggtgactctatatctgaaacgtgcaatgtaggtaaggtacttctgttgtttctcctaatttgtgactattttcatataatgaatgatggtcgtgggcattttggtatagaaggttttaattatggctcagtatttgtgtaattaaccaagtggaatgatttagagttctgatattactgaagtctttacagctggaagtcaatggatccatgccagtacattattaagtatacaattacttatttgcctatttatcccttctccaccttattacaaaaagatattgaggaaacttacacacatacacacactattaccaccaccacctaaaatgaatagatgaaattaaggtaaagggaaaataaggctaggagaaaaataaccatgctaggatgaatagggttagggcaaagaacatgtaatataaaattctatatggggctagagctaggctgtaaatttggctctggattttctagcagccaaaacaaaaagagagaaaattaatgagctacaggattcaccatattcataaaatgattaaagaagattgggattttcccttgaacccatcttgtttgaagtgggggcatttgatgctttctttctgctagaaaggttaactctgagttgcaataaaaatcataaaaacacaactttggcagaaacataaatgaacagtatgacagaatggaagcagttcacaggatttctaatattacctctcttttcctcggtccacattctaatattccaatatgctcctcagcacacagagtggtccaagaagattggccattctttccggaagttggacttccctgaagattatgtgggaatgggacgtggaacctgataattttttttgcagaatgaaaacttttatcatgaagaatttttctttattgcatacttttatacagttaggccccaacccgggaattagtggtattccaaaagttcctttttaagttgcttgtttgaaattaagaatgtatttccctccaaaaatgatgttggctacaatctaatttcagacttgcgatgaacccaaggttcaaagaggttaaatctgaataaatacagttctacaattctgtattcaaagccattgagaccagattttgctgaatttggatttttttttttttttgaagaaggaaagaaggataatattgtgcatgtaccagtcatatagcagtgtggtctggagcaggatcctataatcaagcacattaatatttctgcagtgaaactgatgaatattcacacgcagtggataaataaaaactataaatagcctcatgtcagttcaggtcaggtttgtcaccaaatgaattcaggccaaatgagttcaggtcaggtcaggttttgctgccaaatgaattataaaaaaaaaagaatggttttcaccacttttggggtttcagattagtggatctttattacactttttttaaaataaaaaggcactagtattataaactttaaccacaatgtaatgttattttatggaaaaacgtattgaattcctattaaggaagccaataagtcattgctgtattgcggccctgtagcaaaaatggagtgtttccatcaggctggagtcagagcagaaaaggacctcctctgtaacccaggagagagagggctcttgtcaggcaggtactggtgatagtattgggagacctagggctgggaactggggaggggcatgagacagggagacgggaaagcaagggtgagtattattcttttccttctcccttattcatttccctactttttctctttttttccttcctcttaatttttcttcttcttttttttttttcagatgtagtcttgctctgttgcccaggctggagtgcagtggtgcgatctcagctcaccacaacctccacctccccgcctcccaggttcaagtgattctcctgcctcagcctcccaagtagctgggcctacaggcatgcgccacagtgctggctaatttttgtatttttagtagagacagggtttcactatgttggccaggctggtctcgaactcctgacctcgtgatctgcctgccttggccttccaaggtgctaggattacaggcgtgagccaccactcctggcctaatttttccttcccttttaatgctagggcaaggagcatggcagtggtgtcaggtggccttacacttccctcttctcccactctttccttcagactacctgtaaagacactggagggtgctgaaataacaccgcttttaaaggtagttagaccacagtctcagtcttggctctgccctctggctgtgggaccttaagtggtttgctcagcttgtaaagtggagaaaaaaatatatatatatatgaaatactttatgtaatattatatatcatatggtaagtatacgtttatataaattggagctatgcatatatctttgagtggcatcccagaatggtagagaagattcagtgcagtgttaggtgatagtccctaccacagaatgcgagttcagtagatggtaatatccttcatcattgtttgttgtcccctctcgcaccttccagaaatcctttccttgtctccctgaactctggctgagaagcagggagccacagtgcagctgtgaaggggaggaaacaggcttcttctttttttggttttgttttattttatttgagatggagtttcactcttgttgcccaggctggagcgcaatggtgcaatctcagctcacggcaacctccgcctcctgggttcaggcgattcccccctgcttcagcctcctgagtaactgggattacaggcatgcaccaccacaccaggctaattttgtatttttagtagagacggggtttctctgtgttggtcaggctggtctcgaactcccaacctcggatgatcctcccgcctcggcctccctaagtgttgggattacaggcatgacccactgcgcccagccaggaacaagattcttaagcgttgagtatggcaaggcatactggggaagtgatctgcaaaagcatgaaagccccaaagtgtgggtgtttgtatctggtctgactgagggatccagtcccccttcgggacctgcttttggctttggtaaatcctaagacttagaggtttctggaagaaagactaatctgcagtctcttctgggagttgattggaaacaggtatctttggggcttacccagagctgttcacagatgtgagggctgatagtgccttgccttatcccatggccagggcctagcaggagtagcagtaagccctccaagaagccactagaaattgcacagctattctaggattgacatgggccctggctggtggtactatagctcttcatattaactgcatgcaacctttcaataatattaagtgcgtaacatctgccaggcactattctggggacatgatggttaatgacctagacaagatccctgctgtcatggaaacaaatgagggaactatgttggagaatagcaagatgagggtggatgggtgagtgagggctgtcagaggaagtgacactgaagctggcacctaaaggatgagcaagaattagccatgccagtagcctcctagctagagaggccagcaagttcaaagggccaagatggggaggagcttggtgtgttctgggacctgccagaaagtcatattgttggagcttcatgagcaaaggggagaggatccaggattgagccagaccttgctgagccttataagtcctggacaggagaatggattttattcaaacaagaagcccctgaaggtttttaggacagggacatagtttgcacagaagagtccactttgcctctctagtggatgtcatgctatattaaaaactggcagagtgctgggcttcttcagtgatactccagcctttcccttgtttttaactcacttataaataattttaagtcacttttcctctttattttttaggttttctcttcaaatccaattaactatcatcattaattaaagaatatgtgagcagtcatgtctgtagtattgagcaattctcctgttatctgttttttgctttctattatgggttttatctatttatctcccaacacgcccatcatttgctgccagcactggcatgctttctcttttaagcttttctcttttcctccctgtttcagatttgtgatagactctttttgtgtttgtccatttatttcaagtccgttaggggcattttctcttgtctgtgctgatttgctttatagaacttggttcagtacaacaaacctaaaacagctccttgtacatagtaggtactcaggacatgtttgttacatgaatgaataaacctttaggggcaagatctcctgggcttttgtgaagaacatgcagactaatacattatgttcctgcccttaagcagactactgttttagcagggctacttcagaacctaaagccaatgtttgcaatagaagcctaataaaggaagaatgtagaagtgtgcaatgtagaaaggaacttcgggcatataaatctgactccagaacctcagatccagcctctattctggctttttagtaggcgagttcttcaagggagagggaagtgtggttatcatggacaactgaatcggggctttattcacactaggagaaatgacccggaacttggtaataagatgaaagaatgatctttcagagtcgtagtagagcgttgtctaacaagacctaaggctcatctgattctgtagaggatgtgacttcattttagatgttaacttagagaaaactgatatgatgcaaataatttctggcaggtagaaaagataactctaaaggttttgttttattgtcctatagaatattcacatactacataaaaaaataacaaaaaatacatacaaaaaattctaaattacatacaaaaaaacctacattttgtatgtaatttagaatcttattccagtatttttttttctaaaaccgactatatgtatcaatttcttagccaatttactgttttcattaatgaggtatatgtgtctttgccatgctcactatatatttgcatgtggattatacttttaacattttgaaaattatattttgacattcatattcagtaaagtctttagacatgaatgtacatgtcattatccaagttacctaattatatcataccatgtaacttttaaatggacacatcgcagatgtcacaataagggaaattatagtatgatagagaggtaaacattttacttacagaaaacctgaactttaattttaagaggttctcagagggactctgtctttgtagaagttcgatagaaacaatcttagttaattttaggccagcctcagggaatgctctcactgaactgacctggtaacttgcctgtgtctactatactctttcttgtattgtggaaaaaataaaaactgtaaacttgagagacattccacaaatacaaatcttgcttcttttgcttaaaaaaattatgaacataattatagaaaaaagtagattctggttgtttaccataaagaattactactagaccaatagcaaaggaagttacaaagcacagatcacaaaaatctctccaatcacgtcaggaagttcagccctggatggtgtttgtttacctacagtgagggcagtctgtcaccagctgatgccctgttgagagcctcttgatctaaacaggaggttcagtcaatcactattaactgaaacctacattaatatgtattattcctcattaaacactgttaagaaaatgaagattaatacatgctgtattttgaacagatgacacataaagacaaaaactaaggaagcaaaacatagtacctgttggtaaaaacttcccaatcactgcttaaacaaatcctagtactgacctcaatcagggttttaaatacttgactctaaatcctttatcttgggccaggcgtggtggctcatgcctgtaatcccagcactttggaaggcggaggcaggcggatcacttgaggtcagaagttcgaaacctgcctggccaacatggcaaaaccccgtctctactaaaaatacaaaaattagccagggtggtggtgtgtgcctgtagtcccagctactcgggagactgaggccagggaatcacttgaacccaggagaaggcgctgtagtgagccaggatcgtgccactgcattccagcctgggagacagagcaagactctgtttcaaaaacacaaacaaaaaatcctttatctttactttgctcctttcaggatagctctggaatttgaatctgctttccagagctttattctcaactgccagcctcatttttcatactgtagttacttaagggtggaggtagtcgggccggcaagtaactacctgcagtgtacttgagaacctttgaaagcatctgtacttgccaagggtggggcatgtatgcttgagagccctttaaagcgtctttacttgctaagggcgctatgaccattcccattcctgggacttcattcccgctgggacctcattccccagtggagggtaaagcatggcttttgctgacggtttccaggtagccttccaaagtatgttagcataaaggactggagatgctgaccatctggctaactcatgattcagaagccctttggatccacttataaggccattctatttaggcctgctaaggatgtctgccatgctaatgtcaaaagcagggattttaggttatgttagtgatcagtgaggaattttaatatgttgttttgtcaactactgaggctataggcccttttaggtcttcaggagaagtagaccagtaaaataaacactgtgtgtttaagctatgagagctcaggatccctgtggttagcagttatgaggcacttggacacatatttatactaagagttgtagcttttacttatcttgggtaaaagaaatactccaaacagttagaacaaaaaaatatatctgatggtaaaatggataatgtattagtccattttcatagtgctatgaagaaatactccagattgggtaatttataaagaaaaagagatttaatggactcacagttccacatggcagggggggcctcataatcatggcagaaggtgaaggaagagtgtattagtctgttttcatgctgctgataaagatatacctgaaactgggcaatttacaaaaggaagaggtttattggacttacagttttacatggctggggaggcctcacaatcacagtcgaaggtgaaaggcacatctcacatggtggcagacaagagaagagagcttgtgcagggaaactcccctttgtaaaaccatcagatcttgtgagactgatccactatcatgagaacagcgcaggaaagacccgcccccgtaattcaaccacctcccactgggttcttcccacgacatgtgggaattgtgggagttacaattcaagatgacatttgggtggggacacagccaaaccatatcaaggagcaaagtcacgtcttacatggtggcaggcgagagagtgtgtgtaggtgaactaccctttatgaaaccatcagatcttgtgagacttattcacactatcaagagaatagcacaggaaaaacccacctccatgattcaattacctcccactgggtccctcccattacatgtgaggattataggagctaaaattcaagatgagacttgtgtgcggacacagccaaaccatatcattccacccctggcccctccaaatctcacgtcttcacatttcaaaaccaatcctgccttcccaacagtcccccaaggtcttagctcatttcagtgttaacccaaaagtccacagtccaaagtctcatctgagacaaggcaagtcccttccgcttatgagcctgtaaaatcaaaagtaagttagttacttcctacatacaatggggtacaggcattcagtaaatacactcatcccaaatgggagaaattggcccaaacaaaggggctacaggctccatgcaagtttgaaatccagtagggcagtaattaaatcttaaagctctgaaataatctcctttgactccatgtctcacatccaggtcctgctggatgtaagaggtggtctcccacaactttgggcagctctgcctctgtggctttgcagggtatagcccccctcccagctgctttcactgctggagttgagtgtctatggcttttccaggtgcatggttcaagctatcagtggatctaccattctggggtctggagggcgtggccctcttctcacagctctactaggaagtgccccagtgggaactctgtgaggggctccaaccccacattttccttctgcactgtcctagcataggttctccatgagcgctccgcccctgcagcatacctctgcctggacatccaggcattgccatacattctctgaaatctaagtggaggttcccaaacctcaattcttgttttctgtgcacctgcaggaccaacaccatgtggaaactgccaaggcttggggcttacacccattgaggccatgacccaagctctaccttggccctttttagccatggctgggacacagggcaccaagtcctaggttcacacagcaggagtccctggacctggtccatgaaaccattttttcctgctaggcctctgggcctgtgatgggagagactacctcaaagatgcctgacatgccctggagacattttccccattgtcttggcaattaacatttggctccttgttacttatgcaagtttctgcagctgacttgaatttctcccaagaataggggttttcttttctgttgtatcatcagcctgcaaatttttcacacttttatgctctgcttcctcttgaatgctttgctgtttagaaatttcttcctccagatatcctaaatcatctctctcaagttcaaagttccatagatctttagggcaggggcaaatgccaccagtctctttgctaaagcatagcaagagtcacctttgctgcagttcccaacaagttccttatctccatctgagaccacctcagcctggactttattgtctatgtcactatcagcatttttgtcaaagccattcaaaaaatctctagaaagttccaaactttctcacatcttcctgtcttctgaggaagacattttcctatcttcttcttagccctccaaactgttccaacctctgcctgttacccagttccaaagtcgcttccacatttttgggtatctttatagcagcacctcattcccagtaccagtttactgtatcagtccattttcatactgctatgaagaaatacttgagactgggtaattcattaaaaaaaaaaaagggtttagtggattcacagttccacatggctggggaggccttacaatcatggcagaaggtgaaggaggagcaaaggcacatcttacagggtggcaggcaagagagcatgtgaaggggaatggccctttataaaaccatcagatctcttgagacttattcactaccatgagaacagcatgggaaaaacccttccctatgatttcattacctcccaccaggtccctcccatgacatgtgggtattatgggagctacaattcaagatgatatttgggtggggacacagccaaaccatatcagatacagttcccaaatattgccttatccctcacaaaggagtggtgggcttagaaggccacatgtcagcagagtcctgcatctcctctgcataggtttatatcaccttctaatttggaaaattttttaaatctctgttctagctttgtcatatgccctacatgacagtggaactaactaccctatgattttcacctcagccaggcttagtcttcaggttccaggtgttggttgtttaacagcatcacaaaacctagggctcccaacatatgaatacacaaacttacaaataagacaggcatttcagagcagaacatctggtgtttgtctgccccacaggcgtacctcctttaggtgtaattcattggaatcccagtcagccgatttaggagcctaagtgcattagctcatggccagtgcactgtagccacatactgtagtttcttcaggttgagtgatgcttattgatctgttagtttgctccgcagagcccctctctgccccaggtaacttactttctgatggtaatattttgatagaaagtaaataactttgtttcaataaaagaaaaagtagcatatgattattttaaagattaaggtacagattggatatttttggaaaatttgctgctttttaggcagatgaactgttaggtgggtgtgggccatgttctaagcccaactaaatccatctttagaacaattctaaagaaagcagaaaagataaagatatcaagtcataaatgtatacttgtttattgagcatggtttaaaattttaatcagcctacaatcagccctggcatccttgattccccttactttgttgcactttttaaaaaagcactaataattatctaaaacactaaaaaatttatttatgttcattacttactgagtatttgccccttcatcctccaagtgagtggcacaggtcaggcatctttctcttttttgttcaccaatatatctgaaatgtgtgttacagtgcaaataataaatgttcaataaatacttgttagtgaatgttgggaatgactcaccataagttcagcgatattaagattagttaagccatgatccagtgaatatgtccatttttaggaaagcaccctcactaaaaggaataaaattttgttgtaagacttaggcccattactctggccctggtgaactggaccagaccacttgtaagccacacagggacctgccacaaagagagaggagataagacagagcctggatctctaaggtctagagcggagctggtttaagctgttttattccagggccttccttgttcactgctgcatcctcagcatccagaactgggcctgctgtgtagtagatgctcaataaatattttttgaatgaagaaaggcaaagtccttctaagcagtaggaagcctttctgtataggagtagaagaaggaggaacaatccaaagaggaaatgggtccagtgataagagcttacaagaacatgccatgtaggcacaaaaccttaacttcttggcacatcaggtatcagggaacttccaggcagtgcaggacacacaacctcctagccttcatccacactggaaggtatctctcattctcctggcacacctacaggtgggaagtcttgagcactgtcttgaggctgaacccgccactgacagaaatgattcagtttaacagaaaatcagttaatttatttgccagtctatttgttcacttgattaccattgtcatggctgagtgaaattttcatttaagggatgaatgaattgtaaccttttaagcaccatcacttaaaactatccaaccacttttgttggaaaatttactaaaacatacgtatatttccccatcttcttaataaagcattagaagattttcgtattatctcaagatcatttgggaaacattgtgctgttatatagtagtacacttagagtctactccaggtagagttttcattatgccgaagaccatatattgtattttttgaattctcatgcctgtttttcttggttttactgtcttctctctctggtaggttatgtgttcattttctagtgctgcctatgtggctgccccaagagtctccaatctcccaaaacatactgtccctggttatctgtagaaaaatagatggccaagtttattagattcatctaaaatacaaaggaagtttaatgtatggactttgtgatacccacaagcctcctgtttcatctctcccatctctagttcttctcagcagtgctctggaaaattgggctcatcagacatgtggcttctggagaaatgaggttttaataacttgtcgtttttctgttccaaattttgagagtagcagtatatcactgcttaaaatgtgctaatttttgagataacttttcttagcctggttctcattagagcttaagaaggagacaatagcaataggacattgtttgctcagcctctccatttctgtaggaaaagaattgttaggaggaggaagggtagggaaaaaaaagtgcaggggagtgtcatcatctggtagatagtttaaaaaaattcctctggctttggagtaggaaaattgattgtagaggatccaggaggaatcagagaggctgttgaagaggctatggtagctgtccatgtgagggacaatggcttggacaagggtggcagtggtgcagatagaaaagggtggttggactcagcatacattggaagaagagggcacaggaccctgtgtcagatattttggtatattcctcctatcattagagtttagtcatgtgtattcacaccccacatttgtttcttctaagaaatgaagtctatccgttaaggaaatgtcagttaatcctcattgctgctgttatcatggttggatttgctccaaaaggtatgttaccatatatagaattaaaaccagtctctaccctgtggggaagtaatgcagatgttttgagattagagtttagaatctattccaaagatctgccagaacacatgtttaacaatgagcatgagagttttccccattgctattcttactatgttgtttatcaaacaaagataatttgggggcttgtgtagaaactccacaatatttaagaaaataaacacaaatctctgagtcaataactaaatgtttctgatggtatactaagaaatataacttattttattaatggttattaatataaccatgacttttaaattaatattaatattaactgatattaatattaatgtaaccatgacttatattaatggttattaatataattatgacttttaattcttttaattaaaatatttgtggttctttatagttcaccacagctttgaataaaacaaaattgttttcatgttttaaatgcagtggaaggttttatgtttggtgttattcaattggtaaggcaaattgctttgttattagcttgatttacgtgaaaatttagatttaattttagatttggtagattttaatctgataccattttatattggtttatatctgaatgcttcattaagatcctgggtatacacagtttaacctcaagcatatagtcttattatattattttattataagaaacagaagtatggaaacttgaggctgggactgttcagagctaaatcttatgaaatgaaataagttcttgtaatcattttgcagccattatttgttgtgcttttgtggtattttgtctcttttgagctatcctcacaggtttccaggaattcaaggcctaagaaacattctactaagaacttgaaataccaaggcatttaatttttggaagtgtagaatgttttattacttttgaagttttgaggaccagcaaaatagagaagtgtattgtgttacacaatttgctatgttataaatgtttacttttagtggacatgatgtaactagaatggaaaaaaacacagaaatagtaattgttgatataatcttgccttggaggtagcgatgggtgggggaatggggagtgggaacatagcatgagaggagaaaaaaatctgttaccaatttatggtaaaattattacagttaaaaagagttgcatatatgaataataataaaaccttcacccagctttcttgaaagtttacaaacttcctttctttgcttagaactagctcgagaaaggaaaaaaaaaatcttctcttagattctttgcataaaaaactaattcctttatttttctcaccggttctcttcatctttcattttggtccccagagaatactgtttgactattttgaaatcatttctcttctccactttgttgcactttgccctctgggatcgtttccccagctcactcttcttcctttgtcctactgctccctttacccccacctctctttctatagccaagaaagaaacttgttaaccatgactttttcttttaggaaccaattcaaaaatccctttggtacacaggtttacaggcaccctatctcagtctgattccagaaaaaaaagcaccaggaaatacaggaaaatatgtagctattaataaattccacagataggcagaagttgccaaaggaaaatgggagaacaacaaggactgttcattggacttccaggaatagaaattgttgggagtctactcttttcaaaataaactgacatggggctgaccaccttgtcagttactcccatctgatggtggggtgtggcaaacaagggcaaaggtattgtttggttttcaaggtcaggctgctaattgtataattggattaacccagcccgcagagacatggagactaccagtcacttgttagcctgggtcccaaggtagaagcagcacaaaagtatggggaggatgttcagctgaaatggaaggaagaaagtaaagaggatagagaaaaaaatacagaaatgttagccaaaggagttataattaggagaaaaccattatcttattaatctctgtgtgattaattaattataaatgagttttctcttggaaaagagcgaagctacttagtatgacttgtggggagagtgtgtgtgaggagaagaaagtgtactttttctgcccaattatggaaggtcttaaacatcagccatgtttttaggagtttgactaataaatccagaaggcttattatttattttatccaggcatgttttatttactatgagagatcttcttagttcttgcttttgttttgtaagaaaaatgagctaggttagcagtgtccgttttctgtttttagaaaataagatgtctgagatgttagaatcttcacatataatttgtcctaccccacagtcagcaatttcatatctactgctcacagtatgcccaatcagagcacagacaggtgtgtgatggtggcttctcagtaggaatttacatttaagggcgcttgtcttcattggtttgtttgccattcattcattcattcattcattcattcaacaagcacccactgcataccagcactgttgtagggatgtttatcctgggtgagtgtgagaatcgccttactcttcaggtgcctccacagttctctgctgatttctttagtgatgatttgctgacactatgcacagtggtagaggtggctttagcagatattggaagggtgccccagaagaagtgagtgacatttgagccaaaacctaagtgatgatcaaggggaagactggttcaagcagaggggcctgtaaagccagggctgtaaggtgggcatgtgagatagggagaggaagccgctgaggtaggagtctagcgaacagggtgagaaggggtaggagatgagactgggcaggctggcagtgtcttcaactctggctgcactttgcagccattgaggtggctcaggccatatcacagaccaattcaatcagaatctctgtggacccagacatcagcattttaaaaaaattctccaggtgactctaatgtgagtttagatttggtctgattacactgggaagctttggaagagaatgatagactcagcttttcattctttaaaaggttgctttgaggctgtgtgtagtgtgaagggtacacgggggagaaggggaaagggtgtcttcaggaggaccagttaggaggctctagtggtggtttgagtgagagatgatgatggtggcttaaacaaggctggcagtgaggacaactgggagaagtggtcactttcaggaagtgaggaatgagattaagagagaaatcaaggatgactcgttgtttggggaccagaacaattgggtgggtggagtggccatttatagaattagggacgacgaaaggaaggtggtacaggtgggaggaggatctgcagacctgggatgtcatctcattcccattatcctgggctcctagaagacacagctcacacttcctacaactctttaagttcatacctctattatagcactagtaggctgcacattgcctaatatggactctctgccttattttcagcaaaattcactgtgtgaccaaattggtattatgagcactagtttcatttcatgacaaataggaatagagagaaaattctcaataattttcccagctttaattctctgttgctcagcatgctttgagccctgatggatttctttcgatttttcagaagaatcctgcctatgctttaatataaaggaggatgaatacggcagattcagaaaattgtggtgtcaaaggatgagctttgctttcctgccatcttctgtgctttgtttccttccaaccttaaaggaaatactaccctacttcaataaaaaactaaaacaaagattcaactcagcagaaggaagagcccaataagcttaaaataaatttgcaaaggctaataactggaaaccttttttaagctaaataaaagccttgtgtttaaagtgatagtctgccttttctggtctgcatcatgatagcttctaaataaagaaaacgggccgatgttgtgagtaattgcagctgctactctgggggttacatcaggcaagtgatttgtcaataagaatttattgtcttcatttctgggatgaggctgagggcaataaggaattcagaaggctgcttccttgtctttaaggggtttgtagtccattggagagatatgtctggctttcttgaaccagttaacaaacagttacattagatgtaattggaagctaacttatagagatgagggcagtagacattaaaagaaaggagaggtcaggcaggaaaagccatgaggtcagtaaaggcctcatgggcaatagggcttgcctggcaaatatttggctgaggcaagttggaagttgagctggaccttaaatgatatagagacctttatttaccgttatgtgctaatagttaaaatttacttatttgggactgctaacatatgctcaagttaaaaatgccaaaggtctcctttctattcctgcccccagtccctcagtttccctttccagaagcagtgctatgactcctttcctacaaacccttccagatacagtatcaaactttttttttttacatatatagcatttcttatttttttatttgtaaaatttgtccttttccaagtgctaaaacagtaaagaacaggtaagctaaataaaacaaaaacaagtcaacttccctgtggggaggctagaacagtgctggtctcattgactagtggggagcagtacatgaatgaggtttgcttttcctaagatatttgccttctcattgattggagtattggtggctaaaacgtaagcaactctgaaccctctagcacttacagaatggtgataatattgtgttgagtgctatactatgctagaacttcacatctgttttctcacatctctgtaaggtgagcctttccctcccttgacagatgacgaggctggaactcaggctaagttagcctgttgtaggccagacagcaaataggaggtagagctgacttctgacctgaccttttcctaccatattatgctacccctctggatctaaagctcttggttctgtatttctagtatcattgttgctgttttcttttatggctttacatactgagtccttggtatgaacttggggtgacccaagagaaaaaagtgagtggaaactaacttcctctctattaaaaaaaaatctgctcaaaggagaagggcaaattcacagctcagtttcagggggctgcaagtcaagtcaatattttcttctttttttttttcatgtggataaactgcctccctcattttgagttttcgaatctgaaataatgagagtctaatgaataacaaatatatacctctttttcttcttttaattcttattagcattttggattcaagtctagaaattcctcttcatttttttttcttttttgtctaacatttcttttgaataaagagtattacctacttttaaatgcaaaaaatggaaaattgggaagacattgtcttcttgctttttgcagaggcaacatttttattagtgtgcatatgtgtaagtttggccccaggctgtgctcacaatccccaagcccctggcagaaggggactccagggtccccccatctcagggatgacatgtgggtcagtatagtgtcaggatggtgatgatccactggctctgaaaccacagaaatgttcatcagtgtctgctgccgcctacctgtggccttcttgttaaatgagagaaataaacccgatttcttttggttgttctatcattcctgcagcccagaaacaaagagagggtatgactggttcagggaattttattcagtctggtgggcagacagaatgtgaagagccagccagggtcccaagatgatgctggagccattagcacggcttacattttcaaaggtcttgtaaatcacattatggttttaggatgtttttcctgggcagttattttaatcaggggatcagacatgatcaacttttttttttttttttttgcttaagaacgatcactctggctgctctgtgagcagtgaattggaagtgacaagactaggggcagggagacctgtttggaggctatcgcactaaccctggtgagaggtggccatggcagagttgctggagggaagggggagaattctagaaatgtttagggatacaagagaacagggcttgatgtgggagatgagagagaaggaggactttagggtaacttcaacatttcttgtttgtgcagctggttggttggtggcgctttttggttgacaaagggtatacagaggatgatttcttagtcctcttattgatagattttaatacaataaagtcatctcgaagtttcagatacatttcttcatgctctttctaggtttttctttcttttacatgtttcatgggtgggggagggtttaagagtctcaattgctctggaaattgaccttcctgctagggaagagatggtggtatccttatgacagttttcttccaaattgtggaacgctttgtggtatttagtaatcatatttttggttttttttttttgtctacagggagtggaattactttcatagaaatatataaaaattcattttttctctcctaatttttttttgtgatacatttttctgtaaggaggaattataggacttaactttctatgagtgtggtaaagaggataaatacctctgtatcctctttatataaatgaaaggcatctatccagttttgaattatttggggaaaaaaatcccatggaggaatgaactcgagataattaaatttctccaattcagaaactctgaattttttttttttcttattaggaaagtggttgagatatggctgaatggaaatttaaaatcttgagcatggttatacatcagaaacgtaacatgtagtctaggtccattccagagagcaaaaaagactcaatatttttgacattattaatgaatagattgatgcatttgttatgcctgcagagaaacattattttatcacgagttgcctgcagctcagagagtaaagggcttttggaagagttattcagagagaggtcaagggggagttactggttttttgtttttacaaggaagttttagtaaatcatattaatagtaataataataatgatgatggtgtacatttgcatagcacttggcagtttacactgctctttagagtgcgggatccacgcagctctctgtgaagtaagcattttataggtgccaaaacagattcacaaagtgtacctgaggtcatctgtttcctggagctgtaatttttcccaataatcagtaatattccccatgcattacaatggtatccacaatgcagctgtgtggggagaaggtaagcctctttattgagggtgagagggcatgaaccggctcctgggtgcgccctcctaggattgagttagagtttgcaatattaaaagcacaactccagtcacacctgtggatggtaacaagatgctagactgagcacgataggctatttctcatttttttttcctagtaaaatttatttgttctttgttctcatgtcttctgttagcattctttggaaaggcattagttagtgccacaggttttagaaaaaaactaagggaaaaatactaaagctgagaatgttttattaagtttttttttttctgtgaattagtaaaagactgtcatgtatgattttagcagaataccttgatccagattgaggaactccaaccagtaatcctgggaggcataatttaagaaccgctaacagaagcattttgaaagtgattgaaattgacattccttaaaaaggtagtttattgccttctgaggaacatttgtttagctctttaaattattcatatttgaagggaaagcattctacaagaaatcttatttttgagatatagctggtaaatatggaaaactcaaaacgcctgcctgttctacttgtcatcgttcatcctctgacagcttacaccagtcaagttactaagtctctggttatttttgagactctttctccccaagcgttccttagtgaatcttaagattctgggatttagcttagcagacaggctgtgccaccatgcagtgtcttctttggccctccctgccccattgcaatgtcttttactacaccttatttagccaaaaatgtgcagtcctttagtgatgagaatgtaataatggaatacttaaagtaattaaagatactgctttttctgattgaaacaaaagctaatagacttccaattgtcacctgtcacagtgtacttttttggagttgccctttgagctgtgttatctgatttgaacttttcaagcttcctctggccacactgggatttttctctggctatgccctgcagtccctttactgaattggcagtgctcctaatgcttttctctagctttcatttgaccttcagtagaggttaaaattaacttcaaggtgaaactggtcctcgtgattggtcgattgcttctctttcttgagcactgcacccatttcagaagacagatggttttagtattaatggcatcaaccatcctttgctggaagataaagagtcagactttctatttggaatgtaagctccttgagggcactgagcttgtttattcaaccttctattcctagtgcctagaacagtgcccagaacactgtagaagaagatgtgttgattaaaggaatgaaactttcctatagggactctcaagagatagctggcctaacttagaatagaaatgtgtgtgccaaggactcgtggtttcaagaaacagatactcaagtgggtgtggacacatttccaggatgttctccctctcacatgtacccaaccagaccctcgggccttgtcctttctgtctggttctagggaaaaagcccattgcctgtgctttctaaaataataaatctcacattcacaaaggatctggtttctgcatgtttttctgcatgttccaagctccagccatgtgcaagtgatattaacaaatttatttatgatttgttcgtatcctcctccttccagagattggttgaaatattaaactgttcatttctattcttcacttcctttaagccttaattggagccacttcttctattggataaacgccttccctggttggcctcgtttctctcaggtcccttgtttcactttgtgtttcctcagttgccagtaggctgtgctgtgatgctttgcatttatttggttatatcatgtatacatttattctgtgtcctctattagatactcttgtcgttttttaagctaacattcattgaggtttattgtgtgtcaggtcctgtgtttagggctttggatcctaaattatcacattaattttcacagcaactgtttgcagtaggtggcattatccccattttacagatgagaaacctaagttttagaggagagacacacccaaggatgtacacctagtaaatggcagagctggggtttgaatctttatgcatttaatttaaaagcctgaatcatcacatttcacaccctcttagaggaaggcagggttcatgccatctgcttcctccaaccaccaccactcttcagcagtataccacagaatgctgtaagcttcttatgacctgaaaagatgtattttaaatgcaatcaatacaagtcttctgaagaaatacacacaagcaaattcaattcaacaccaccaaaaactccttcaattaagataaaccagtattgacattttggagtatatctttccttgtttcttttgcaaagaattaagtatatacattggaaacactcttaaggcttaatgcattctgctaataaatttctccttcttagaaccaaagttgtgtgctcactaagagccatttgtttttttcttagtactgtttatgccaatcgaacttactgtaattctgtaatctaattagatattacgtaaaccaatgaaatatgagtataaaaatagagttgttgccactaaaattaggttgaatgctttagcaaaatgtgataaaaacaaatctctaaaacaattgctctagaattcagagtaggtggaacaactgaaagatttgaaaataaatgttaaaagtcacaaaggattcaacattcatattgcttcacaagtgtatttaaatttttgtttcatgttaaagaaattgaaactgaaaatagagaagaagatggattatggatatgatttatgcaggaaagattatgtggaattctagccagcaaatactcaagtcctcagtgttaaagttaaaataaaatgttttaggcagcaggtggtttttttttttttatgaatcctcactttcactagcttttgaaattaagcaattaacttctgatcctaaatgtgttagataagaatgcttctactctatatatctcaaaaaagaataacataatttgctaagcagcttttttcatgtaatatatcatgaacatgttttcaagccaataaatatggattaaaacattttctggcaatataacgtacatgcagaaaagtacacagatcctaagtgtacaactcagtttatgatcacaaagtgaacacatccatttactgccctctacttaggtcaagcaacaatattcccagtacccccagaagcctcccatggcctcctcctccccaccagagataatagctactttgaatctaacattataatgtttgttttggaactttacgtaaatgaaatgtctgtagtttttgatttttttacttactttactcaatatttgtttgtgagattcatccatgtttttcacatgtattatttgtttattcattctcattgcagtttattatttcatgtgaaagaagataccataatatttactcattctgttgtttttgttatatactttatttatttttttttttggagacagggtcttactctgttgccaaagctggagtgcagtggcacaatctcagctcactgcaatcccacctcccaggttcaagtgatcctcccccaagttagccgcctgagtagctgggactacaggtatgcgtcaccatgcctggctattatttttgcattttttgtagaggtggggtttctccacgttgcccaggctagtttcgaacttctgggctcaagtgatccactcgccccgccctcccaaaatgctgagattaaaggcatgagccaccactcttggcccaccattctattgttgatggccattggggttgtttccagttgcgggctattatgaaaaatgttgctatgaacattcttgtacatgtcttttggcatacgtgtgcagttttaaagttgttcatttgtttatatgccttaggaatggaattggcaggtgataggatatgtgtatgttcagctttagggaatactgtgaaagtggttgcacaaatctacaatcccatcatcaatttatgtgagttactgttgttccttatctttggcaacacttggtttggtctgtcttaactggttttatccaaactggtaggcttgttatagtctcttgtgattttaatttgcattttcctgttggctaatgagcacattttcatatgtttattgaccatttggatgtcttttgggtgggcatgttgaagtatttgtttagtatttgtctcttgcctacttttccatagaactgtcagacattttctcatttatttgtacttatatattctagatgtaagttcctttgttggttatatgtgtcagcaatgtcttcttccactctgtggcttgcctttattgctctcttagtagggttaatggagcttcccaattttaatgttgtccaacttaccaatctttctctttgttgttagtactttttgaggcttgttcaagaatcttcacttatgccgaaggtcatgaagatatcctcctatgttatctttttttttttttttttgagacggagtctcgctctgtggcccaggtgggagtgcagtggcgcaatctcggctcactgcaagctccgcctcccgggttcacgccattctcctgcctcagcctcccgagtagctgggactacaggcgcccgccatcacgcccggctaattttttttgtatttttagtagagacggggtttcaccgtgttagccaggatggtctcgatctcctgacctcgtgatccgcccgcctcggcctcccaaagtgctgggattacaagcgtgagccaccgcgcccggccccctcctatgttatcttttatcaactttattcttttacctttcacatttagatctacaatccacatggaattaatttttgtgtatgttgaaaagttagggttaagtttcattttatgctacattaatatccagttgctcaaacagcacttaccaaaaagaccatccattccccattgctctgccatacagcctgttccataacataaatcaaatatccatatatgaatgggtccagctgtggactccttattctcttccactggtgtatttcccttgagctaataacacatactttgattactgtagcttagtagactgaggactacatcttcttcttttcaccagttcctggagattcttggttattcttgatccttcacatttccaaatgaaaagattagaacagcttagaacagcttgtcaatttccacaaatacacacagagacacactcagatttgcagagatttttaatgagattgttttaaatctatagatcaattgcttttacaatcaaatctctaagagaattgatgtctttgcaatattgaatcttcctctttgtacatagagtatctttccatttatttgtgttttctataattcattgaaagttttatgttttagttatttatcttcaacataattctttccaatggctatagaatattttttggttaacataaaaatttattaattaatctccttgtgttgtaaacctaggttgtttctgttttgtttcattgttgtaaataatgtgattatgaacattcacaagtatacatattttagtgcctttctgtctccttggaattgactcctgaaactggaatttctggaacatacagcttgcaccttcatattccccagtgagttctatcattttaaactctctcccagagttataataggttccactcttgtgaacctggagaataactcactgtattttccatttgaattttttaattactattgacagtgaactagttttcatctggccatttgtagttcttttgtgaatagccttttcatggcttttgctcagtgtttttatattttcctattacttaataattgctctttctataccacatataaccccttgtcacgtgtatttacaaaatatgtctgtgtgataaatgaattaaccagtatacgtttgttactggagtggaactttacagaagagcacaaaaagaaaaccttgttaagcctgttggaaatgtgattattccctgaatgtttatgtcctttgcacatttaggaatatcatagcaataatgaacttagtagtagggacaatcagcaactaaatgaagtagaagacagataatataattgcatgggaagaacatagaaattagatccagaaaactgggttctagacatgacctcactgctctttacctccatgatcttgattaaaccatatattctctctgagtcttaatatcttcatctgtatagtgggtgcacttatacttatttatcttccaggtctaagatgagatcatatatgaaaagcaatagtgcaaacagtgaaagttataccatagaaattataatgccaacaaatatagtgtaagtgtggcaagttgaatgtatgctttatttaaattatcgtcttttgaggtaacctaatttataaaatattcagcctaatggccatcattctgagtctgtggtttgtgagtttgtactaatttgcatgactccttttaaaaagaaatggtttgttgtttgaaaaaatcaagttgacatcctttgtgactgttcagagtgtgtttgtggtttattggcttctagggcattaggtttctgtctcccatattgacagtctttatgagctcgttagccactgttctggtaaaagccattttgatctgtgatgagggcactacattaaaagagtattgaagttggaaatctatattttggttctttcattagaatgtgccctttacaaaagaggcaatatgaatttgcattgcaaaggattgcttatttctttttagaactcttgaagtcaggtaatttaattatgtctatgccatagccttttatcttcctctgcaaagaaactctctcttctgacacctcatattggaagccggtcttcttatccccagaattaattaacatgcaaatacttgtctagagatatgggaacagtgctttttcaattagcatttaaatatcactcttaatgatgttagattgactcttttaagggaaaattaaaatagtatagtcatctctggattatttcctagagcatattattgatatttctgaagatatgggcttagtaggagcttttatcttctactgttcacagactgattgagtcagatccagggttggactggacagcaaagcctggttctggccttcctttgcctctggtttcctagctaggcctgctgatcgtgccctgcactgcttctcagtagcaagtgtatttatgtaggagcggcacctgcaggaactgtttgcaactgggaagggtacccagaagcaaggagggaagtatagaggagctttggtagcaatcatctcccaaaaaataaagaagatgaactttggagttagagatgcataggttcaaatgttgcctgtgccactttgaagcagtatgatgttgagcaagttacttcccttcactgagactcaatttcctcatctgtaaaatataaatagtaatatttaccagtcaggttgttaagagggttaaacatgacagtatatatgcaatatgtcttacgtaagtcagagtaggctctctgctgtaacaaagaactccaaatctcagtggtttaacttaggttatgatgtggtttgactgtgtccccactcacatctcatcttgaattcccacatgttgtgggagggacccagtgggaggtagttgaatcatgggggcaggcctttcctgtgctgttctggtggtgacgaatgagtctcacgggatctgatgattatataagggggagtttccctgcacaagctctcatctggtctgctgccatgtgaggtgtgcctttcaccttctgccatgattgtgaagcctccccaccacatggaacggtaagtccattaaatgtcttttgtaaacttcccagtcttgggtatgtctgtatcagcagtgtgaaacagactaatacaggttatttcctgctggaagaaagaggagggctttgcttcatgcagacattcagggacccagatatctttcatctagtggccttgtcattttctaaggccttggaaccctcattgaatcatctgtctctggctggcaggagacgggagagagtgaacatggattgtgcagaaggccaggctggaggtagggcacattgcttccactcagattacattggctagaactcatagccatacctactttgtgagttttttttttttttttttttttgagacagggtcttgttctgttgtccaggctctagtgcagtggtgtggttgtccaggctctagtgcaatggtgtgatcaggcttgaccacctgggctcaatcgatcctccttcctcagcctcccaagtagctgggactacaggtgtgcaccactccacctggctaattttttttttttttttgtagagatggggtttcaccttgttgcccaggctggtcttgaactcctgggctcaagtgatccacccacctcagcctcctgaagtgctaggattacaggcatgagccactgtttctggccaccatagctactttcaagtgaacctgggaaatttgtgcttaagagaaaaccaaaatggatttgtttaataaacacatagtccatcactatgtagttcaccacaaacatatagtaatacttgttgaataaatgaaaggaagaaaaatgaaatgaattttcttcttcatagattcctagagtattagagctgatgggggccttggaagtgatagagattttaccccttcttttatagatgaggagcctgagggcttgaggaatttagtggccaatgcaagatcatccagctgtttagtggcaggaccagaacttgaacccactttccccaaatgctgctgtttattctgcatttaattatttaaaatatcattgttttctgccatagggttgcccttgccttttggaatgtgaagatgggttaggaggtgggaggggggttaaggatgttattctgatcatgatagctagacttcagttttctttggggaagaagaggtttggtattttagggtagatataccctcagggctggaggctctacagcttctcagtaatttgtactgagagtgaaaattaatcttcactcactcactcatgtgtttaaatagcttttctttagtcccctcctatgtgtaacaaatcatccaaggtgatatggatgcaatgatgagcaagatgttcacagcctaaggaaggtgtcaaatatttacacaataattactaaatgaaatgaggagcaaggaagcaacaaggtggaagggaccagctgctagggtggggagggagagggcataaggaaagctttatggaggcagggtcttgaagaatggatcacagttttttgggaatttgatctgtcctgaaatacacacacttgtgtttgtgtagttggtgcaaatcaccttggccagttgtggatgtgcattgagaaaaatgaaagaaagaaactgacaaaaacccaaaatgatgatcaatgctcctgtgagcatttggtgctcacatttaccattcatcgataattttgtcaagtttttaccagtaaatgattaataaaataaccttccagatacagctcaaacatcaataagcaatattttatcacatgccagcaagttttagatccaatgtgcccagcaatttttggttaggtacagacccttagaatttgtaggggcaggggtaagatgcatgaaataacagtaaactaagtaccagtatgaagaggaagacacacacccgtgtagaggatgtgcaaacacgtatataggtttgcattaggaggcctggttttcagaaaggtttctgtgagatgtactatttagagctgagttttggagggctgatggacatgcttaggagttggcatctcaagtatagttactaaatagtggtgaaagagcacgggttactctatagtctggtgtagaggatttttggagaagggggatcgaatggaagttttatagttagtaagtggcagagcttggcttagtaccccaggcttgtctgacacctgtccttctcccatagcaccatagtgctttgctgagaatgtgggtaggagtcagaatcctatgatgctttccgtttggaggttagagtcagggttgccaggggtcgattatgaaacaggtgatgttcattttcagcatcattagctcctctttggtgtgtctcttctctccttggcattcattttctcacacccttcccagctgattcacagtagggtttcagaggactctaggacgtatttgtattattttaaaatatacattttaaattctaaagtatccttatagtaacaattcaagttgtacaaaaaggagataaaatgcaaagtgattttctctttctctaaaacctttaatcctcatctttaaaaaagtatcttttcagaaattttatatggacattcaagcacacacaatatatcctcttttatctgagagaacccatttaatatatgcattttctgtaatttgatatctttaattaatatatggaacagtctttcatacaattatatagttctactttattttattttaatcaacagaatagtggtccactgtactgcttttctgtgattcttatcgaacagtatttaaatttattttcttaatgtctgcatttattatgcactgtgttgcagagaacatccttatagcgatctgcaaacttgtaaaggggttatttgtaggggacttgcaatggaatttctaggttgaagagtgtgtgtatttaaaatttttttgaagactgtgtgtatttaaaattttgatagatattggggaattgtcctccagaaaggcagtaccattttcattgtatccgcagggtatgtgaatgcctgtttcctaaggctttttctttttaaagaggacttgaagccagagaagaggagacaaagagcagagtgggtactaaaagtaagtggcggccaagagaaacagaaacacaggttcacacaaaaacttgtgcatagcagcattatttatagcagccaaacagtggaaacagcccactgttcatccagtactgaatggataaacaaaatggggcatatacatacaatggagtattattcagtaataaagactacagtgtggataacctttgaaagcatgctgctaagtgaagtaagccagtcataagataccatgcatacttatgtgaaatatccatgtaggcaaatccatagagacagaaagaagatagtggttgcttagagcgggaggtggggatgatttgggaaatgactcctgatacgtaaagggtttctttctggcatgatgggaatgttctaaaattagattgtggtgatggttgcacaactctgaatatattaaaaaccactgaattgcatactttaaatgggtgaattttacaatatgtgaattttatgtcattaaaactatttaaaaaataagtggtggcagaatgcatggtataggatggaaaggatgaggatatggtcattctcacgggcctgtgggttgggcaggaagacagtgccatagccagcgagccaggcaaggtgggggaaggtgttctgccaggctatgctgagccaggtattcaggtggctgatgacaatcagctctaggggtggatggtggagttttttcccctaacagaatagagacaagaggcagttgatgccatgccctaggcagggtcagaactgaggttagtacactgaatttcttactcgttgttcttgttcagtccttcgaatacacagaagatactgttctcctggaaggcagtaatagtttcctttgctgacctagaaatgcctgctgtgctccagcatttggaaaaggaaggtcagagagaggaagctgagctcagctgctgagtcaaggaaaagagaaggaagacctaggggtcaccaacgaagatgaggccctcatttgtgaataagtgtagtcagttttaaatttagcaattaagctctttctatatagtggaagtgactgttcttttggaatgtgtttgctagtaaatatcataagaatgtttaaaaggaagttatgattttaagtgacctctgagttgtgctgatggataaaatttagctcaacggaatgagggttaatctcacggtatactcggaaagttaaagggaaatcaacacactttttcaccaaagcccgtttttcctggtgcttgcggctgtttgaacttgctctttgcttctcattccccatcatcgtggctccgtggcatacattaaatcaaaccatgacctccatacattaaatcaaaccatgacctccgaatcttcttagttattttcaggtacaaggttttcagcttcagaaaggacagaggtctccatggttccattttgaagatttttgggtggctactgcttgtttaccagcagtttggtatagaagcccaagacagtccatgtgtggttcagtattgacctaatagcagaataaatttggaccaaacagaagtccttttctttgtcactgtgtttgattaactatcctggatatgctttattctctaaaaacttcatttttgaaaataccatggttattaaacaactagtctttgtgcgtgattaggacataaacaggaatctcacccacttttaaacctttccaagaaataacttttccactgattttattttgaattgttaaaaaacttttagcagggagagaaaatttggttgatgattcagagcgcgagggaaaggaagcaagggattctggcacatgcgcacgagttgaatgacaactggtggatatttttatatttattgctattcttagcctaaggcctggagctgagtagggagtaactaagcttagccatacttattagacttagagattttactttgtttatgtcaatgtcaaggcctttgggaaaactttggtatgcttagctgatttcttgaaatacaatctttctctcatgcaatttcctctcattcagtacgtgaagaataaaatgttgacaggttaaactgcaagacaatctaagttgctgtttatttttgtctgttagccaaatcttaactcactattcatagccacacagggtgtttttttttggttggtttttttttttttttggtttcagtttgtttctcctaaatacattttaaagataattagttattgcctgtattagaatttctttttgtgttcttgtgttaggattctggaagtagcaatgaattcacaggagaactcaacaatgtaagagcaagatgtttccaccacttactgagttgagggtataagattttatcctttgccagcccctttagaaattgtgactgtgaactgccatgatttaacttcaaaacacagcctgttctcttgtcagtggagccaaagcgttatgcctgaacaacgattataggttagtatagacaagtgaaaaagagttttattttgctggattctgatactacacatacttaggttcagctaaatatcaaaatcgccacagccaagatgtagtcattgatgaggactttaattctacccaatgtctgatcaatgtttcattccatagaaacatagatgtttcaatccagaaaagcctttctattttttaaaccacagattgaggaggcaatgagatggaaatactaccctgaacttagttctaactatctagaaaaattttttattgaagtagaattgactaaaaccttgggcgggagtaaccatgatagtattgtttggtaacttcaaaagaaagaaaagttggacataaccaaatagtagtggtgattttaggaaaatatatttcaaaggaaaaaaacatagatttttcaatatatagagggatttttcaacatatagagacttgaaaagagtacaaaaaaataaaaagaagaaaggaaatagagaaataaaaagaaagtttctgacagcaaaatcatcttttgagggaatgaggaaaaagaaagaaccttttttttttttttttgagacagagtctcactctgtcacccaggctggagtgcagtggtgcaatctcggcccactgcaacctccacctcctgggttcaagcgattctcctggcttagcctctggagtagctgggactacaggtgcccaccaccatgtctggctaatttttgtattttttggtagagagagtttcaccatgttggccaggctggtctcgaactcctgacctcaggtgatctgcccgccttagtctcccaaagtgctgggattacaggcatgagccaccgcgcctggcccaggaaccattttaagatcaaggaatttttgatgggcttggatattaagagaacatgtatagaagattgaaagacaagcacatgatcagggacaaattcagaagagtggcgtaaaccggtaagaaaatatctgcaaagcacaagttcatactgagctgaagctgaagagaatgttaaagacaacaagaaagctctctttaaagctatgttcataacaagaaaaacaagtaaaggctaagctcgttgcttggggcagatggaataatgttaaaatatgacgaaaaacagacctactcaactatttggcttctctttctctattaaagacaatgatgttcaaactggaatgtgtaacataaacatagttaaggataaactgaagcatgcacgatagataatgataataatagttgtgactacaatttcctgagtttctattcaggactgagtactgtaaaagagaatttagttgctttttaaagtacttactggcaggcgtgcgcggtagatattactgttatcaatcccatttacagatgagaaaaccgaggcacaggaagatttaatgacaaacctgaagttacacagtcggtaaatgatgggctgggattcagatcaaggtctgactaacttcaaagcctggctcttttcactggactccctgattcccatgcctgtcacatctagtgttttcaacaggattgcatttttttggtttaaattatattgtaaggcacataaacaaacacatgccagtagatgttattgaagagccacagtgtgtaattgctgtgaaacaaggaaaatggaatatcaaaatgataaacaacacataaagacgttcttgattaccttttttttttttttgagacagagtctcttccttctgttgcccaggctggagtgcagtggtgtgatcttggctcactgcaacccctgcctcctaggttcaagtgattctcatatctcagcctcagcctcctgcatagctgggattacaggcacatgccaccatgcccagctatttttttttttttttgtatttttagtagagacacggttttgctatattggccaggctggtctcgaactcctgacttcaagtaatccacccgcctcagcctcccaaagtgctgggattacaagtgtgagccaccgtgcccagcctcttggttacttttttttaaaggttctctttgaaccatctagagcaaagccatcaaagagactgctgggatcatgtcagaatgattcagaagccaacctgaggggatcccccagagggcaaagatgagacagtttgagcatcaaaaggattgaaatatataaaaatatataaaagtccatgagtttatgacaaaattctaaagacacaagacaataagacaaaaaaatcccgcatttgtcacttctgagattgttagggcaccaagtcattgttctgaaaatggatttaaaaaggagatctcacatccacccctgctttcctatttactttatagagaattacagctaataaatgcagaagggtgctagaaaagttttaaaaacctacagttttgtagcatctaatgaagtaatggagctaagcaacaaccattaatgaatgataaaatcaggtaaaattggtgctttctaacagagaatcaggctgacaacacttgaacccacggatcagtctccatatcactaaaagtggaacagccgaacgttagttatgctcctccaatgtgatctgatagaaaagaaacagcaccacctgtgaagtattcttacccacatcccctccctcaacgaggctgaaccagaagctcatcaaacatgcacatctaactattaataccaggttataggaaatacgggagacagaggaacatgctaaacaccactacaagggtacagatcagccaatgcctgaatgtaggaagttctacaaaacaaatgacccatttttgttttcagtatataaatgctacgagaaaaaagtagagatggggaactgttaagtactgtaaactagttcaaccattgtggaaatcagtgtggcgattcctcagggatctagaactagaaataccatttgacccagccatcccattactgggtatatacccaaaggattataaatcatgctgctataaagacacatgcacacgtatgtttatagcggcactattcacaatagcaaagacttggaaccaacccaaatatccaacaatgatagactggattaagaaaatgtggcacatatacaccatggaatactatgcagccataaaaatgatgagttcatgtcctttgtagggacatggatgaaactggaaaccagcattctcagcaaactatcgcaaggacaaaaaaccaaacactgcatgttctcactcataggtgggaattgaacaatgagaacacatggacacaggaaggggaacatcacacaccggggactgttgtggggttgggggaggggggagggatagcattaggagatacacttaatgctaaatgaggagttaatgggtgcagcacaccaacatggcacatgtaaacatatgtaacaaacctgcacattgtgcacatgtaccttaaaacttaaagtataattaaaaaaaacaaaaagacttaagggtgggagatggagcctgcagtgagctgagatcacgccactgcactccaacctgggcaacagcgagactccgtctcaggaaaaaaaaaaaaaaaagacttaagggacctgtaaaccaaatgcaggtatgaatcttgtttggaacttgatttgaacaactgactaactaaaaaaatgcctttttttttaaacaggcaaaaataaaacatactctgtttattacatgttactaaggaattactggtaattttattgagttggtggtattgtgagttttaaaagtccttatctatttagaagcacttattaatgaattaatatgaggcctaagactctttaaaaaatactccttcaaaagaaaaaaagtatgtgtatagggaaatacgtgaaatcagaatggtaaaatataataattgttgaagcttggtgataggtttttgggggttctttacactttcctctactttgttatgtatggaaaattcacataataaaaacagtcaagtgttctatttgagaggcagaattttggcagaaggcctgggttataacccaatttgtatagcctggggagagtcactgctactccctccttttttgcctctttcctttcctttttactttccttctatttcttaagaaatcatttgctgggccacattttcccccagggactgtcctggtaccatcagccttccaagttacaggtataggtattattattattattattattattattattattattattattattttacagatgaggaaatcaaagcagagaagggactaagtttctcacccacaaatccaggtctgcctgtgtccaaaatctgagctcttttgttttattttatgctggctcccaggagtagtcctctgattttataatttttaagtttttttatttttaattttgtttatggataaattttaaacaatgagtaaattaagatagatcaagtggagtagcatttgtgttttttgcatgtgagaaagatgcaaggtatggttgttactgtaacaattacaaagatttcatcaaaggcaagcagtgataaaagcaaaatgtgtggcaactttcttcatattcagaaaagagtaaaagcctataaattgtaactttaagccataaaataacatttatttatgcttgttcttcaaaagcttatatttgataatcttttttgttagaagtcgaagcctgagaaaaatggctaatttcatttttcatgtgtttgtaaaatatttttaggactatcacaagaaattccctaaaaatgtcaaagcaaatgaacaagtgaaattctgcacatcccttgtgccactattttgtttacttactgaaaaaatgacattggcttttgtaaaacctgggtgtgctggtgggcatgtgcagatgtgtcgctgtcatctgtcatgtgtcatgctctggatgtcagaaccagacatcagtcagggaagagagtgagtagcaagccacctcgccaaactcttgctgcagggtgcacggggttcacatcctctgcttagatttagtgcgactttccaaaacacctgcagtgcggtacttcatggctggtcccacgtaacaatttatgccctagagatgtctgactagatcttaggaaattatactaatggttctgacgttgtttccttcaagaatcgaggcgctaaatatagtcaagctgaatgacaaaattttactcacactcagggcatgtcagtgagggcatcaaaaatggaaaaataataaatactgctgatatttactaagttttatggtatgacaggcactgcactaagtcttttgaatatctaatcatgtttaactctcaatgtcccattttatagctgaggtggccgcagcacagagaggttaagtgagttgcccaaggttgcacggttaataaatggcagagctgggctctaaacccaggccgtctgacccctgagcctttcctcttctaaccactgtgcagtctccaagcaccagcagaatgaagtgagcacgtgctaatccacagctgtcatggtttggccctctgtgggctttcagagcaccttaaaaccctttgttctgtgtcagagctgtttttcagctttgcagatgtctgaagtcaagcagaagagatggagagtctgataaagcacacgtggcaaatctctggccgagttgatattagaacacagagtcccagagtgatttactgtccagggggaaagccagttggcctggctaccttgcaagacggttaaaggacataagaatagatattcattcaagactgtcagaaagaaagtaggtcagcaatgaaataaaaacaaatgtcaaagaaacaccactttggtataaataaaaagtcgattcttcttaataaagagctgtctgttcttcattaattagaaaagtacagagcctgcttactttgagattccaaaacctcttcaggcacaactcgttattaatttgatcactttcctcaaaagaatgatattttgacaaatacagtttctggcttcagtcacatatagaaacattggaataagtacaatgttgtgttttgcttttttttttaaaataggaactatgtttgataatgcatatactccaaacacctctaaaaataattttcaattggcaagctattttttggtgtattttcctagtctgggagaggaagttttatcatttaatttgataaacttagtacctttgagagaaaggaggagaaaattttaccatcttatgtggttgaaatatgctttagtatttacataattgaaaatgattcaaactgatttcctctgacgaacatccgaaatgaaaataaaaattgtgtctactccaaagggtagtggcttgagtcacccactggtatgtgtgacctatgagtcactcactggtatgcgtcttcccgatcccctggcctatgggttagaagtcaaagatgctccactggggcttcctttgtagcttcttttccccttcagtattcaaccacagctactgctggcagctcctggcagaacaggaatgggagaccaaggagaggatatgtggaagctgagtgatttatttataggggacttttggcaaatgaaagaaaatagatgtgaagtcttagcagttccagcatgttcatcagaaatgcaagctcatgatagtcatttcaaagggaattgtggaagaatggtgttaccctacttcacaggccattaaatcatatatatgtttggttgccagtgagaatctgagtagcagagcagacaagaataaggacgtatgggatcgaggcctgtagcttgtgaccatgaacaagtcacgtgaccctttggccttaaattcaccataaagtcgtgtacttgatctcagtgattgtatcttacttcatcaaaatggtatgattctaaattcctgtgggatatacaggtaagacaggactggtggagcattaggtttggtttttcctttaaaagaaagtgttggggaggcagcagggaatagcaaaggtcacagactcaaaagcattaactgccgggcctatgaagacacgaatgatgtaggtttgatataatggaggtacaaatccatgttttatgcaaaacctcatatttctaaactttggcaattcattcatgtttatcaaatcactgttttaggccccctttggctggccagtgggccctctgctttagacttctggaataaactccacagttgagagatgaaggacagacctggattctaacagacctaaatttgaaccttagctctgccctctaaggaatgtgtaaacgtatacatctgtatttaacttctcaaagcttcaagtttctttatctgtagaaatgagaatgataatacctcttttgtaggatttcctgaagactgcgggtactatgtattaagtatacatagtaggcacatcctcaaagggaattccattaccttttctatggaggtagatcctgtataatttttaaatttttgtcttgatggccagttgctcacagtttttaaaagtgtagtagatgccagcgcttctttatagattctgaaatcccttcaatttacattttagttgttttaaaataaagatttctttaagagacaacattcagagggataagttttctacttgccagtagaggtagaaggcagtaaaaccaaatagatctgtcagttactgtcttgaggtagagcccctaaagcaataaaacccacctttgacaatgaggaaacacgagacatcattttctccttaggacaaaagtctagtgagtaatggcccttctgtgactaatggtaattctgtactttattcccatagaaaatctaattttgaaaacatttgctgcatgccctactatgtactaggcactatgccaggggaataatgtaaagatgaccaaaacataatggaattgttgcctacaagtatgtttcggctatttaaggatttatattgcagtttgtgcaaattgtgtatgagtccactttgagaggttatacatatcttccaataatgttgctattgctcaaaatatctttgaagtctctctttggaatttacttttagagcccttagcacattctgctgaagattttttttttttttttttttttttaccctagtggtatttattcttagaaggtggatttgatgtcagggactggccaagagttgttcatcactaagtcagcctcatgggtggtggttaaactggctagagtaatttttcgttaaaaacgagccaggactgtaaagtagtatgacagggtttttttttttttttttttttttttaatatcacatcaactgattgtagagaaaaagatagttccaaaaaggcattctgcacattttttgccccaaaccagtatcactggaatatatttgtagctccctaacaggctaactttgaaataagtggtgctcacatgtgcatgtgttgtagtacgtctgctgaaccttgtacttaacctcttagcaaactcagtgtctttgttttttcctttgaaatgttgttttttcaagttcagggatagattttctccaagaaaatgaaacaaataagatccactctcaaaggaccttaatggaaagaaatacatgcttataccaagttctttaaaactatccaaactggaaaggattgcctcatagctgactgtgattattctgccatgatttagggacagataatttcctatcagcatgtttaacatgagaattaaagagttctgtagtgtggcctattgacctcatttgttcattccacaaacatcttttggagtccactgtatggcaggcattatcacttaccatggtgaggatggtgaggccatgagcatgcttcacctaaggaagcctgatcttcaagaatgcaaactcactcaacaagaaacttgagagtaattaatagtagtgttggtaattatcctgtcttttccttgtaggattatttggaggttgtgaagtggtaagtctctttattgcatttgaaatatggctcatctcatgaccattggaatgtgtgtacgctctggaggaaacccatctctgccatgtcacctgtattagtctgttcttatgctgctatgaagaaatacccaacactgggtaatttctaaaggaaagagatttaattgactcacagtttctcaggctggggaggcctcgggaattatggtggaaggcacctcttcacaaggtggcaggagagagaatgagtacccagcgaagggagaaacctcttataaaaccatcagatctcgtgagaactcactcactattacgagaacaggatggaggaaaccatcctcatgattcagttatctccaccttgtccctctcatgacacgtggggattatgggagctacaattcaagatgagatttgggtggggacacagccaacccgtatcaacacctgaccacagtgtgtgtggtctctgaggcccagtggtggctctcagagcacctccttagcaaatgtaccactggacccttgttagaatgatgttcttgattttttaaaatttatttttgtctcttgactattcttgattcaggaatgttcttgattttaaagggagggtgtgaggtagttgttgtctagttgtctagatatcctccacctgagaacgctgtctggtgtcatagaaacagcaatggcattgggatcaaaagacaaactttccagccccagctctgcctctctttagcagtctcctgacctatacaaggttcagttttcccaccatttaagggaaaccaataccactgttttattcacagcactcttgtgggaatcacaggagacagggcacgggagagcctttggggaactgtggatgttagtccctgtcgtcatcagcctttccatagtggagcctgggctactctgaaatagaagcacctctccttcctttggacccctggagcactgtgttctacagttcttagctctttttctgtgtgcattatttgtatgtcttatccttggtggtcaaccacttcaaggtgagagactggggtggtggttccttttttttattttttaatctcccctgccccatctttctctttcccacttcctatgttgactgacaaaatcttcgtatttcccagagtaccagagtttttctgtgagaggctaggtcagtgtttctccccaagcagaggctaagaagtacctgatgcagtcatttattttcagaatgtgtgtagcttgcctccagcggattgcctgggaagctggagatgtgcttcaggggaaaggtggtccatccacttttcctgaacaggctgtgcatgcagccttgacatagccaactctgcaggagcatgaaagaactgaagatacagtattcgacttccagtatttctaatcactttagagacaggatgacgattggtttagaagagccaggggatgactaaggagcacatgtaaaacaataatgttcagtatagactttagtttctgatttgaaacattttctaaaaaatcatgtatctttaaaaaattggaagcagctcagtgtttgctggagatgaggcatagagtgtggtggaagggagggatgacaaaggggcaggcagagactttgagggatgaggggtgtgcacatcaccttgctggtggggactgtttcatggttggatacatgtgtgaaagcatatcaaattgcatgctttaaatatgtgcagtttcctgtgtatcaagtatacctcaataaagtagttaaaaatggtatacctttattatgctgaaagaagggaaaatttggaaaggagatgtttttctgtagaagatagcttctagaaaggaaaatcaaacacagtctaagttattctctgttttgttctcctccctccacagatgtcttgttgttttgggtcctcttatctaaaatttcacaatatgtgaaagtagcctgaactctaaaggtagtagttgtggttttgggaaactgtgtgttcgtactgcctctgtaaatggaacacaagcctctcctaccctctggggagcttgtcacttagtacagttttttaggaactcctaagaagtttaagttctggccacaggtcccagagttaaggatgttgtcaactctgctactcatttgaaaaatgtcttgtggaacctatagccgcagaaagagctttgtttctctgggtgaaaacaacatacattatcatttctaataactttaatggatgctgctgctttcttctttttggcccccaagatactcagagataaacttgaaactcaactataggtggggggagggggaagggatagctttaggaaatatacctaatgctaaatgacgagttaatgggtgtagcacaccagcatggcacatgtatacatatgtaactaacctgcacattgtgcacatgtaccctaaaacttaaagtattatgataataataaaaaaaaaagaaactcaactaaagcatggtctgcatacttgtgtgtatattttcgctggtctcaaatttctatttatttatagttttctggcttacagtctatatttgtgtaatatttatatggttttatatggttcttgatggaaatcccctaaaatccttttcgtagcgagtcagagaatgaaatctgtggtttaatccactggcttttctttaggcaagagacagctgtgctagaagaatggaggattataataaatttgaaaaaccagaacagttcttcaggtaagcatgatctgtactcctgaccttaggaattgactctaggtcccagattttgaatttcttatgagcataatcatctacttaaaaaaatcacttaattaacagtgattattgagtatctgcatctcctccaagaaataaaatgccatatacatgacacacacacacacacacacacacacactcttgatagtcctacagatgactaatcactccccaccccccgacttcctgccttttcattcatacattggggttgggatctctgctaccacaggagctgttgcagagaaaaagatttttaaaatactatattatgtaaattagtacaaccattatggaaaacagtatggaatttcttcaaaaaactaaaaatggaactatcgtatgatcaagcaatctcactactgagtatatatccaaagaaattgaaattggtatatcgaagagatagctgcactgccatgttcattgcagcatcattcataatagccaagatagagaatcaacccaagtgtccattaatggatgaagggataaagaaaatgtggtgcatatacacacaatggaatactattcagccttgaaaaaaaggaaggaaaccctgtcatttgagacaacatgggcaaacctggcagatgttacgttaagttaaataagccaataacagaaggacaaatactgtgtgatttcacttgcacgtggaatctaaaagagttaaactcatagaaacagagagtagaatggtggttaccagggctgggggttggggtggagggcaggtggaggtgaagttagtcaaatgtacaaaatctcagagaggagaaataagttttgagatctattgtacagcatggcaactgtagtagttaataataatgtttacttcaaaattgctgagtaaatccaaatgttcacaccacaaaaatataagtacacgaggtgatggatatgttagttagttgagttagctagctaactaaccataggtataagcataggtataagcatataaaaataccacattttatcccctaaatagatacaattattatttatcagtaagaaataataatataacataaatactatattgtttcaaaatagagggaagaaaacatgcaaatagtcctaatggattttttttttttttttttttagtctccaggctggcttccagacaaggctgtatggtggcccagactggttgaattttttcacttaactttttgttgatctgccttaatttccaataactagagattctgataagaactttaagaataggaatacttctgagaatcttaagatgttattagccatatataagtaaccatacattttataaaagcatttttctcttcacaatagctggaagtggaacatcctagagaataactcatttttgaaaaatagaatgtcttaggggagaactggcctgctaagtattacaggggaggactcaggacaaaatcaagttatcagatacctggggcttagaaagcaaggagttagaaggtagaagaggcttacagaaaggaggaaagaagatgctggagaccctctttcatctattatagaacattttctatggctggcctgtattcagagaaggatacctatcttgctgctttctgcaccaaatagttccaagatccaaaattcaagctagtgctcttagtgaatagtttggttatattacgggttaaatgggttttcctataaagctagccaccatttatggtatttagatctaccacttaggaagatttcagtcatattcatgattttcaggttgtcctctctcagaaccctggtgtcataaactgtaatagttgtaggaattgttgtagtggatatagcagtaatattttctatggaaaaatatagaagttaatatatgccaggtactgtttcagttatggacactcatttaaatatatgaagtagatgctattataatccccaattacagacgaggaaactgagagacagaaaagttagataacctcccaaggtcatgtagctactaagtagcaaagccttgatttgaacctgcactctctagatcccatttaggctcttaactgctatactgtcttaactggattgaggttttccataaaattaaagtttcccctgaatccacagaaaatgttaacaatatatagaattttctggatttaatttttttctgtctcaaatctttgtatctaggatcacagataactgaagattgaacaagttgcaaatttcttaatagtcacatatgtatcattatatactcagagtttagccagataacccaccataaattgctaatgaagcttaataatttatagtgaaaaaacaaaaatagaattgcaaaccataagcaactcaagacgtgcacgggggattatgcatccttcccccagtttacagaaattgcaaccatcagcatatgcgttccacatcagtgccaggcattgtgtggcaatcagacttcttatctagaaactctagaaatgtactacttttagtaatcctaaataacttacttaataagctatattacttaagctatattatgcacaaatataaagctagaaaacaaaaggtgaacttggacttcctctatcctttataaaaatggaaggacctgtgctttgctggattggtttgctgttcaggtggaaacccctcgtggtccattcagtgggctgtgggcgatagtttgagaatcctgctttaaaggaagaatacagttcatacattttattaaagacagtctgctaaagtgatggagctggaattttctcagtgagagcactgtataacagggttttctgttttccttttttcataacaaatagtacttctcacttaaaaacaattgttccttacaatgatgtctgggatttgcttcaaaataatcctgtgggtaaagagttgggaatgagttggggaataggtggaagaagtgggatgaggggcagataattgtcaaagcaagtgacatggggcttcatgatactgttttctctacttttctatatctttgaaaataaaaagttaacagcaacaacaaaaaccttccttgactactatcctacctacttcatttctctgctcttgttcacagcagagcttctaaaaggaactctctgtatatctcatttgtacatcctcatcctccattatttaagcaacccattcacttggctgtcctccccaccagccaactgaaattacctttttaagggtccccaccaatcaccatcttgccatatggggtggttaattctctcttatgttacttgactttcagcagcatttgatgcaataggtcactttttgtttcttggagcattttcttttattggctcatgtgcacccacatgttctcatttcttctgcatcttgctggtttccaacagctgacctctagctgttggaaagcctccaatgcttcatccttgggtttctctgtactctttctgagtaatctcattgggtcccattgctttaaataccttctggttgctaacttaacatctgtagccctgacttccagacttgaatctgagaggcatctcaaatttaatgtatccaaatcataactcttaatcccagccttactttcttcctttcttcctcacctcttggtacccccatctcagtaaataacactgttatatatctggctgctagagccccgaaccttaggcatcacccttgattgctctttttccctcatatcccacatccagcctatcactatgacctattgtcatatctccaaatttacctgaattcatctactttcctctcctctcctgctaccatcccagtccgaacctctgacatctctcactggacttccatatcacctcctaatccatctctgcctctgtgtttgcccctggcagtccatggagagaccagccagagtggtctctttaaactgaagtgccactcccccacttaaactcacccattggcatcccatagcacttagaaggaaagccgaactcctttgtgatgtacctgctgcctatgtctgccccaccctgccaggactcactactgctgtcacacagatcccttttctgttcttcaaatataccaagtgggagtcttacctcaaagcctttgcagttctcttctctctccctgctatacagatcaccataaggctggcttcctcttactacctaggtttcgtcttaagtcacctccctagagaggtttgacctgaccaccctatgtaaagtattcatataaccccaggccacactctatctcatagcccattttattttaatttatgtaaagcatttgtgtttatgtattatttttttgcccctacctataaagtccagaagagcagctaccttgtttgtcttgttcagtgctgtatccctggcacctagaacaatgtctggaacatatagaaggttaatgtttattgcatgaataaacaaatgaattactttgtttgtgatttaggatcaaggaacttttccccaaaggcgaatctgtgcagttttatcccacgcttcttccccatccctaagttcctgctcatctggactgtgtgcttgcaaactgtgtaaagacttgttcaacattcttaaataggttaaagaagtactgcactttgggctctttgtcattttcaagtcacattctatcctgggcaccatccggaggggtcttgtccagtttcctagtttctcagaaaggaatatttcatggctgctcgcacgtcctcttcccttacagtatttggactttacaccactcattggcagagccaaggcctaccccatctgagcaaagagcaacagagatctgttggctccattcactcctttgctctaagactcacttgtttcttcttatcttttcccaactatttttagttgtcaaattgctcctttctttccctttcccatctatttttcttttcctgtggaaaacaacccatatatttctagtttagtcagattagctgctaggaaggccctttctcaagcttatttatataacgaaaagctatacccaaatcctaatttcatgtgacaattgagcagcctcttgtaaaatagctagaacaagggcaaggatattaatttggctcttggactgagacacactagggatgtcccagggatttgaacaatttctaatcttctcagaggagggcataaggaaattcctaaccaaggtgaaatcttttgtcacatcctagagtagataagtacttcaagaatcttctagactggggataagttggaactgctaaatattatctacttatctaatgcatgtaataatagctatctatgtctattttatcaagtagctgggaggataagtttggtttttttttcaaggacttttgagctttttcttcaggtaatatatcttaagggaacactttatataaagctaagccattgggaaattttttctgccatagccaacagttttgtaattaacattcctttgcatggtataaatacaaatctgttcttttgtcaggatcattctttatgaactaccatataaaagtcatctgggctgggcacgatggctcacacctgtaaacccagcaatttgggaggccaaggcaggtggatcacttgaggtcaggaattcaagaccagcctgggcaacatggtgaaaccctatctctactaaaaatacaaaaattggcagggcatggtggtgggcacttgtaatcccagctacttgagaggctgaggcaggagaatcacttgaacccaggaggcagagggtgcagtgagccgagatcacgccactgtactccagcagggtgacgagcaaaacggtgtcaaaaaaaaaaaaaaaagccatctggataatacatattctttattagtattaagtatttacttttagatcaatgaaaacatttctatggggctagacttttccttgtcaagattataatttttcttatgagtttttacctgaaacccctattttctaagaccccatggttaatgagtctctttgacattaatcatttcaattttgctggttctgatgaccctgtgctatctattagagctctaaccctttgcaaacctctcttctgcccttgtcagtgtctcacgtgctcacgtgcatcttaggctggatatcacgtggcacatcctggtaccacctctgctgctttcactggccactgttgcatctgtttggtgcagctgcttcctccactgggaccaacccctcctcttccttacaaatattcggaggtggggaaaatggaaatgctatcattagaacatctggcatcagaatttgctttatgaagaaaataatcttgggggaaaacactttgatgagtgcttgcggaagaaaaggaaaccccaaaggcctgggtattgggagagctgctttgtgtaagccaagggcaagcatttactggttgctttgagagtgaggggaacacatgagagaaagaaagagaggggagggtggaagaatggcaggcatcaactaaatggcataaaattgtggggagggtcttgatgcacctgttcctcatggtctccagacttttctgtgaagtacagcatgtagtgtggagtggatttcagggggtgaacttggagatgcgttcattcacatcacagtcagtgcaggtagtgtagagacaacagtcatgggaaagggagcccaggaatgaaggaggccctgagaacatcatccctcaccaaaatgttaagacgggttttgggtttccagaagctatagagttggtggcagtttgagccaattttttcctacatcttgaagggcaataagaatcccacataatgtctgggccacatcttggtggtacctggtataactttgccaaaagaattttaaaaccaccgcaataggtaactcaactgctggtactgtattttatgtgtgcttggtatgtttatatgtctttaattctattacaatttttttattgcacaaagaacattataacaatgcataattatatatcaatagcaatattaaaaataaagacaaaaggacacattcagccaaatgtgccttcagtgtctggcaggcaagtatggcgtagaaagggcaataagaggcagttcctgcctttagggggcttccaggatcgagcctgcagtcccagcaccctattgaatcaactgtttctgtttttccattttagttgtgtcactcaggctttgggtgatttattaagagaaccaataagattttgctcaagattggaaacaatctctttccacatcatttaagcctcagttgaagcttcattttcctccttcagcttcacctgagactccttctggcaaaatcccgctgctcctccttgatcctgtagttttctctgttttaacccttggaacatgatttataattcgtgggatgactttttcttttttcccaggaaatgatacctttcttgaaggcaggaaactgtgttttgtctgtattttgtgaatccccacaaatatttgctggatgaatgttcttggggacactgccctagatatagtagaagcagaagtatttctcggtttttgtgtttttttctggaatgaagggtaaggtgaagggttatagacagaaataagactgattgagtcataattgcacctttgtcagtcactcttgtaagaattttacatatgttacacttcactcagtccttataacaaccctatgagatagcaattatcagctcctccctcctctccattttaatcatgacctctcagaaacagagaggtcaagtgacttactcaaagtcacagctagtaggtggcagttagatctgaactcaaataggctccagagactgggctcttgaccattattcttcctttccaaggttggaagagactgagagacctcagctcctgaacacctggaactgccaagccacagctgttactattactgtactgttactaaagagccaaaccaaaccacatggctggctcctttggcaagaacttcccctccagatgtgcctctacttagcactctgatagtgagcacaggtgagtccgaggaaagcaggccaagaagtgctgatgagtttctctctgaggcccagggatacccagccatgccaacaaccagccctcccatgccagtccacgccctgtagcctggctctcttactgctttaggagccctgggctctcttacacctgtgtggaagagggagggactcccaggaacataattaggagtgggggaagggaggagaagaagggagggaagagggggaggggagaaaggacatgcatttctaccagggtaactttggtttccttatattaatataagggacttgaactgtgttattctttctcaaattgggatttaaggccccaaggaatccaaaaattctatgagaactaggtatttttatgtaaatgattaactaaaacaacgaatgtaaccttattctggatcatcttccaatggagtcctgcctcttgattttactttctgaggttatgtttgtgactgtgatgcatgcaaatctcagtcacctacagtggccacattcagacaatttgaaatgcattttatattgtaacccagcacacacacacatgtaaatagaaatgcaccaggagtttcctaaagtattgctcaccctttctgcatagggagtaccctcttgtcacctctcttctattcccaggtagtcatgacccactatcagattacaaccttcaataaaaagatcatagcatgtaactgtaagcatgatcagtctgccgttttcttttgcagtggaaatgttccattgaaagacattttatagaatacatctttaccaccctaagttgtttaacaaactgaatctttgacttgagatcatgagaacaaaataaagatatgaaataatgactgttttattctgaattgctgaaaaaatacccagatagtttaaagctgtaaatcagaacagggcaaatcagagtctcattgctgtaggggtatagacagaaataagactgatagagtagtaattgcagctatacaattattttcatcaaaacaacctatatcaaagtagccgtgttatttactttgtaagcagatatagtgcatggatctcatctctgaatatgccagcttaaaattcattagcagaaaatgtggtaagtgtaccatgatgacttactttttcattaacttaacatttgggatacactgtattagggttctccagaggaacagacttgatagtagatagatgatatgatattaatagatagattgacacagagagagtaacagataggtagataaatatagatatgaaatttattgtaggtattggctcacataattttcgaggctgagaagttgtgtacaagatgcagaatcaggaaagctggtggtgtaattcagtatgtgtgtgtgtcggggtagggactgggggtgtatagggtggatatagtatacgtcccagtcagtgttggaatgtccaagaagagtgctgttgcccaaatgcaggagaggatggatgttccagctcaagaagagagaaaattcacccttccttgcttttttgttctatttgggccctctacagactggatggtacccacctacattggcaagtgatatggtttgattctgtgtctccatccaaatctcatctcgaattgtaatccccatgtgttagggagggacctggtgggagatgactggatcatggggacggttcccccatgttgttcttgtgataatgagtgagttctcacaagatctgatggtttaaaagtatggcacttactcctgctctctctctctctctctctggccactatggaagatctgccccttgcttcccctttgccttctgccatgattgtaagtttcctgacatgcatactgtgagtcaattaaacctcttttcttcataacttacccagtctcaggtagtatctttatagctgtgtgagaatggactaatacagtgagggtgatctttactcaatctgttgattcaaatgctactctcttatgaaaatacccttacagacacatccgaaaataatgtttcgccagctatctgggcaccccttaagcccagtcaagttgacacacaaaattaaccatcacatacactattaaagtggctgaatcatttattctggattagggtgattttatcattgtggtggtagttaatacacttttctgtttgctatatttcctgtaagctagtcgttgaatctagaggcttgattagattcaggttaaatatttcaggcaagaatatcttttattggtggtgctgtagactttcaaccataccacatcaggaggtacataaagcctgtcagtcccatgtgtaatgatcatagattgattggaggttttgacattttcaccttgatctttccattataaagttccttatcaacctttcacaatggtttaatgtttattgataactgccaaattccagtacttcatgaggtggaagcaaaatggtagtttcctaattcctacattcttctgcatttattagctggtattgatctctgaagaactttccctccttaactatttgattggccttagatgtagttcttaggccctattttattttatttttatctatttttttgagacgcagtctcactgtgttgcccaggctggagtgcagtggtatgatctcagctcactgcaacctccacctcctgggttcaagtgattctccagcgtcagcctcctgagtagctgggattacaagcacccgccactatgcctggctaatttttgtatttttagtagaaatggagtttcactatgttggccaggctggtcttgaactcctgacctcaggtgatccgcctgcctcagcctcccaaagtgctgggattccaggcatgagccacagtgcctggcctttaaaaaatgtttatttaaatagttttgggggtacaggtggtttttggttacatggataagttctttagtggtgatttctgagattttagtgcacccgtcacttgagcagggtacactgtatccagtatgttgtcttttatacctcaccccctcccatccggccacaacaagtccccaaagtccattacatcattcttctgaatcctcatagcttagctcccacttataagtgagaacatacaatatttgttttccattcttgagttacttcacttagaataatggcctccagctccatccaagttgccacaaaagacattatttcattcctttttatggctgagtggtattccatggcatatatacaccgtgttttctttatccattcgttggttgatggccacttaggctggttccctatctttgcacttgtgaattgtgctgctgtaaacatgcatgtgcatgtgtctttttcatatgacttcttttcctctgggtaggaacccagtagtgggattgctggattgaatggtacttctacttttagttctttaaggaatctctatacgttttccatagtggttttactaatttacattcccaccagcagggtaaaagtgtttccttttaaccacatccatgcccacatctattgttttttgacgttataattatgtcttaggctgtattttaaatcagggctctctgagcttgatctcatgtcagccatcatcatatcagtgtgaaaacagactagaaccaggtatcagtgatgcagcagccaggagaatttctgggccaggggccaggccacaagctgcatatcccaatggccaactggtcatggctacttcctttttctcatctagtgcaagctcaagaggtgtgggatgggacaatattccactgttctgcaggtaaatgtatctttgtggggcctctgaatgtcctcttcggtctgctagtctcctgacaaggggggaaaacactatccagaccttttctctgggaggccatttgttttcctgtaatctgtagaagaaaccaaggtacttttgtgggtgcagcatctcagttactgggggagcttctcagtgtgagctctgaatgcttcaggatgtcttccaatagccagcctttcctctgtgtaaaaggtttctctggagtaatggagatagcatgtgtgcaagtaggcaggagctccccttagtgtcagcttgagagcaaggaagggagaggagagctatgcctctgaaacaataccattttgcccccaatgccagttttatttcagagataaaatgccatgcttcagagccatcaatgataattgtttgagattgatgacctttggaagctgacagaatactaacttctgggagaagactagagtagatcaggatgatttcttggtatactctcagctgtttcccaccatgtgtttcctcttctttctgatatacagccaaaatacatttcccagtctgccttgcagttaagggaaactgaggtctcgtcaatggaatatgaatagagaaatgtgtaccacttccaggcctggcccatgaaaacctcccatatgctctctctctttcatcttccttttcccttcaggctggctggaggggaggcagctcctgggagagatttggaagttggcagagctgctattaagctgggttcctgaatgatggcaagaaagaggcccactcctctatcgtattcacctgccaagtattgtttgtgagcaagaaaaaaaatatctactgtagttgaggccatcttaaatacagtttctcttttaaagccattccacgtccaccatttggcattaagcgtctttaaaaaaaactgtgagtgccctgccttgccagtaagctgttagcaagtcttaactcgggagatctgtctctcctggcattctgagaagcagaagtctcaaattacttccagctgaaatggaaaagaaacaaaacaaaacagaaactcatctgtggtaggcagactaatgtccctcccaccgagatgttcatgcctgagtccttagaacctgcaaatatgttacctccatggcaaaggggactttgcaggtgtgattaagggtactgatcttgagattgggagattattctggattatctagatgggcccaacctaatcacaagaaaacattggaaaagggaggaaaagagtggatcagaccgatgcgatgtgatgatttgacccactgttgctgtctttgaagatggtggcaaggccttggagctaaggaatacagtctctagaagctggaataaacaaggcaatgcaatccccttagagcctccaaaagggagcacaggtctcagaactgttaagataataaatttgtactgtttgaagtcattaacatttgtggccatttgtcatggcagtagtagaaaactaatacaccatcccatacaaaacacttaaatgaaaaaaaaaatacatacatctgtagagtaggcacatctgtaggttcttaatgcctgtcatccttatctggaaacttgggtgtttaatgcattttggcaagagtgatgccagtgaggatgttccttggtagcttaaatatatccaggctattgcaatgatgcctgacattgaagggaaaatgcacacatttagtcagtcacatgtatgatttcaaatatctggattttggaattgtataaccaggtatataccagctacatctgaggggaaattttccgttttcatccagatgctctggtaagtgctgacatacccagactatgagagatttggatcaaactaaagaagtccccaagtctcaggagaacaatgaaatgtagtgcggggtgtctgccggagtcatggtgtactcatcagaatgagctgctgaacactgtggtcaggcccttggctagtgacaccattaagattttgtttccttctaaatcaccacccctcctctactgttgaaatgtggctgtttcatctctccattagagtccttccaatttacaccaagcaaaacagttggaaaataaaacttcatggccaggcagtgggtaggagtgagagggaggaggaaaggatgtagacacataattcagaatcaaacattgaatgaaggactcctcgattcagaccccatctcactttgcccatggactcagtgtctgaccttgcattaccctccctgatcttaacttcccagaactctgacagatgattaataatacctgctatacaaagggggtgagaactaataaatggtagttaaggatgatgagtaagccgagtataatagctactgctttcaagatttctcagaatccattagagtttctattgttttaatgactgtgatgagttcagtaagtcatttctgagttaggcaccacttatctttgtgtactgaatattcttaaagccacagttacttccttgctggggttataaagcaattctgaagaccaaatcatgttgcctttgtacatatccattgaggtttctctctcttactctacatggaaatcctgtaatacagatttcagccttacaccgagaaaatatatatttctgagtctttttttcttaatatatatgtgagaaaactctaaagtaagaataaatggaaaatcattagaagaagtatagaaattactttgaaagggtatatacagtctaattcatttatttttattttagaaatttgaatgaattatttcaataaatgtatataaaagattttacattacgttatactcagtttttctttttctttatttttttgagccagtcctccgagcctgtttcctcaactgcccttttctcctacccagtacatcgagctgttcagtgaaaaagaacagtgttttgtgtgtataaataaataaataaataaataaaaataaaaataaacagctaactaacgtaggaaaccctccttctccttccccaacaagttgcctgaagaaatatgtattagcaagactgctggaaatccacatttgttacatgaaattaggacattaaaactgtatcctgctgcttagtgcccagaccttgtaccccatgcagcagcctgcttgtcggccatggaacaatgtgtagcaaatgccttggtgatgacatatctgtcagagggaaagaaggagggcattgattatcataatgcggcatagagctcatttccttctgaaattacccagagatgcttggctgggcaaagtacagcaagtccctgaagggggctgtaatttctcaggcctgttgaaggaaagaagaacaatatgtgtgtgagttgctaagtctttagacgttggcagtggcagcaggctggtaatgagcagattaggtatttcaatatgtttctttgcctcgggaaatttaacaggtacacctgttttctttcagtggctgaaaatgtcagttaccatgagcctggtgtagttggcctttttgaaaaaacaagagaggtggccgggcgcagtggctcatgcctgtaatcccagcactttgggaggccgaggtgggcggatcaaaagatcaggagttcgagaccagcctggccaatatggtgaaacctgtctgtactaaaaatacaaaaaattagctgggcttggtggcgcatgcctgtagtcccagctactcaggaggctgaggcaggagaatcacttgaacccgggaggcagaggttgcagtgagctgagactgtgccactgtactctggcctaggcgacagagcgagactccatctcaaaaaaaaaaaaaaaaaaaaacaaaaaaaagaaaaaaaaggatggactgacacgtggtcagtctttgttcttctggtggcttggacattaacaaagtgttccctacccacttaagcttctcatctgcatctgcacatcagtggtcttcaaactttttttgttatatgccattgaaagaatgttttaaaaactgtgtaccatctcactgtttaaatctgacatctaaatatttccatcattttaaaaataaggagtagaagacattacatgtttcataaggtaaagattgatggtgtgtggaataaatattttgtgacatgatttgatgaactaggttttaatgaccttattgaataacatgttaaattggaaggaaatcagtaaaaagcttatatgtagactttatccagcacatcttgaaagatctgatgacttcagaaaacactgtggttatttaaagataatccacatcacttatatgtactactttgtcctgaactcagaactacccaggactggccaaccctactcttacagacttgcttgcaggacagggagagacagaaagtgctaaggcttcccccaaccagtatttggaatcatttagtgtagcacaccatattaagatttgagatatgagtggtgtgactttcttttgtagagtgggtgaaagaatattgttgatgcccaaaggctctcaggcagtttcagaattagtacatatggaaattgaggatgtagaaactcatttttgtgaaactgtccctgctctagtacctttgggaagtccatttgaagactgctggaatagatcatggactcaataaataccttttcataggagcacagagggatgaacaaggcagactgaaggagagaataggaatgctccccatgtcaggtgtgtggagggtgcaccaaggctcattctggtagaggtagaggagcttctcccaaagtagcaaactcagatcactcatggtctcagtccccttaattctttcaagctgctggatcaagaacgaggcagccagccctccagctgatgaccagagacatttattatctaccatgtgctaggcactgtcctaggtaccagagacatcctggtaatcaagacaaagttccacgtttgtgaagttggggatcagggaggtggagagacagagaaaataaacaaatctatgagaatctatgagaggtagagataaatgctatgatgcagatcacctgagtgatatgactggaatggcacctccagcttggctggtcagaagtggcttctcaaaggaagtagcagctaagctgagacctaaagccatccaaataaaaaccaatgagtacatccatcagtcagcaagtatttatcgggtgcctgctatgtgctaggcactgtttaggtacttggtttacattggaaaacaggcctggggatcttacattctaactgggtgagaaggggtctgacaggcaataagcattataaataagtaaattacctggtatgttagaagatggtaagtgttatgcaaaaaaaaaaaaaaaaaaaagtatagagcaggctaaggaacagaggtagcatgggggtagtgtgtgattttaattagggtgggtggggaggcccccattcagtgggtgtcctgggagtgaagacttgaatgaggtggaggagtgagctgtgtagaaggagctgtgtgaagggagagctcaggctttcgctctagctctccctcacacagcctgttctcatgctgctaataaagacatacctgagactggctaatttataaaggagaggtttaattgacttcacagttccacatggctggggaggcctcacaatcatggcagaaggcgaatgaggaacaaagtcatgttttaattgctggcaggcaaggagagcctgtgcaggggaactcccatttataaaaccattagatctctcgagacttattcactaccatgagaacagtatgggggaaaccgcccccatgattcagtgatctccaccgtggggattattacaattcaaggtgagatttgggtagggacacagcaacaccacatcagttctcattttattatcccatgagaacatccagctcccctttattgcagcactgtgcccacccagtttctcaaggaagccaatgagactagcagacattgtcaggtcacagtattttggagtgctctgcattgcctcttatcagtccagctctttgtggcttcagttgatacatttcagtccccaatcacctctgagtgagccaatgccgttgagtagctgcatgcactgagtactgcattgcttgcccaggtcacctctgaagatcccctgccttcctcagactgaccatgttcctaggaggtcggggaaagtagaccacagtggctcatctcaagcatagaatctttgtgaaggcttctttttattataaacatttttgtgaaatttgacttctttttttcttttttttgagattgagtttcactcttgttgctcaggctggagtgcaatggcgccttcttggctcacttcagcctccttctcccaggttcaagcgattctcctgcctcagccttctgagtagctgggattacaggcacacaccaccacacccagataattttgtatttttaatggaaacagagtttcaccttgttgaccaggctggtctcaaactcctgacctcaggtgatccacctgccttgctctcccaaagtgctgggattacaggtgtgagccactgtgcccagcctgaattttgacttctattcataatatattcatatgtgttttaatataaaatgtttatcatttaaatggattctccaggaaaatacaccaggtttattcttttgctgtgcatataattgtgctcagagagtagttctgcctcagtttgaggaacatcggtgttctggaagaaatcctggattgggggtaaagatatggggttctggccccatctttgccataaattagctgtgtgaccttgggcagatcatttaaacccattggtctccattttctttgatgtgaattgggtggcagtgactgatcagattagatcacaaaatcccttccttctgtcatgctataatgacatagagtcttgaatgccaggaccatgcctccccagtgcctgagtggttgtgcttcctagaccccaaggtccagtgtgtgccagtatggccttaccctctttactgcctcagagtcacagtaaggacttttctttataattgaatgaacacggaatgaatgggcatcttggcatagctggtttacacattattcttgtttcccttttctacatatatgaaaatgtgaactaaatccatagccctcccttggtggataaagacatgggcataatagttccatgaatttagcctctttttgtattcaacagtctcatcccttcccctcaacttgtgttctccttgatagaaatctaaccacttctacaagtggcagctaaagcattagtcttatataaccttctcgctcaacaactgaaaagttgtacaaaccttttaaagaatttaccatcagcaagggctgtgcttctaggcttgtccaaattgcgtgtaaagtacactctctaaattaaccagaccatattaactctgaaaacaagactcactcttcttaagctatgtctccagactgtaccaaattgtactttctcttgaagtaggacattctgtgccctgtttgaaagctggcgtgactaatgtagctggaattgctgatgagagaagacaggaagagaaagaaccgatgtgccttaagaatagggaatttcggctgggcacggtggctcacgcctgtaatcccagcactttgggagaccgaggcgggcggatcacctgaggtcgggagttcgagaccagcctgaccaacatggagaagccccatctctactaaaaatataaaaaaattagctgggcatggtggcgcatgcctgtaatctcagctacttgggaggctgaggcaggagaatcgcttgaaccctggaggcagaggttccggtgagccaagattgtaccattgcactccagcctgggcaacaagagcgcaaatcagtctcaaaaaaaaaaaaaaaaaaaaaaaaaaaaaaaaaaaaaaaagaatagggaatttcactaggccctttgcagaatgcagtatggctgatgtgtgtattatgacatggtaaatattactcctagcctccttgtgaaacgggctccatgtcatgcctcaaggccctactaagtcattgctagggctgagcctcaagcccagccccaacagtaggttcaacctggccttccctcccagcactatcactgcctgtctttcaacctatgctatacattgtgacaatcagttaactgaggtacaagtgtatttggatttatgccagactgagaatgagaaatattcagatcacacctggaaaatgcaatgcaaaactcccttgtcttgagctaaaaatctagaagcatttgcaagtgactaagtcccttagtttataggtatgagcctgtgataagttatctttagttgtttctggcttaaggggatgtcagtgacttttcccttagccccccctcctggaacagccggctgctggtggtctagttttttgaaagaagccctgaattctgaaacctcatgctggggttttgggttagtgtttgcattactgactgtggtttcatggcatgataatgcaaagtttaataagagcaggctgtctttgcctacagctagagttgcattgaggcatgactacttctagtgcctgctctgtgccagattcacagtgccttacagcccctccccagaactggggcagaggaggaagaaaaaagtgactctgtggttcaggggaaggagtaaagtttccaggctgtgtgataggacatttccctgatgcttggctttaggctcaggatggggacgttaatacattcagcagaggctggctacctatactggcaccattgaaggactctgccctggctcagtgctggttttgcttggtgatgcagtgtagtgtagcaggatgatcaccagctttaaagccagatcaacccaaatttgaatctcagcattagtcctcactctgctttgagacgtcgggcaagtgatttaatctcttgaaatctcagtttgttcatctgagtaacaggtggtaaaatacatacattgaaacgctgctaaaagattaagcaatgagaaggcaaaatggtacagcaactttgggagacagtttggcagtttcttatacaactaaacatactcttaccatatgatccagcaatccatctccttggtttttacccaaaggaattgaaaacttatgtccacacaaaaacctgcgcacacaaatgtttgtagcagctttattcataattgccaagactgggaagcaaccaagatgcccttcagtaactgagtggataaactgtggtatgtccatctgtatcttttattcagtgataaaagaaatgagctgtcaagccatgaaaagacatggaggaacattaaatacacgttgataagtgaaagaagccagtccaaaaggcggtatactgtatgacatctggaaaaggcaaaactatagagaaagtaaaaaagatcagtgattgccaggccttcggggaagggagtaagggatgagttgatgaagcataggggacttttagggcagtgaaactcttctatagtatctagaatactatattactctatcaatcatagaatgatactagagaacatactgtagtgatggacacatgtcgttgtgtatttgacaaacccttctttgtgttgtacacgaagaaggaaccctaatgtcagctatggactttagttagtaagtcttctaaaaagcttaaacaaggcaatgtgtataaactaactgactaactggcataaataaatagtggacttcaaaaaaaattcataatcctagcactttgggaggccgaggtgggtggatcaactgaggtcagaagttcaagaccagcctggccaacttggcaaaaccccatctctactaaaaaaatacaaaaaaaaaaaaaaattgtattctaagttccaggaatgtcatttagacatagtttcttttggggctagatgtatcaattttcattaaaggtgatattattatttaaaaatccagctggttgctaaatgagaattagctaccctttataaccagggattgtttcaaagaaatgtagttattttctcccctgtggcctatcttgtgcaaagttagtaatagtttgttgccaaatccaaggaaagcaaactctggctcaggcatgagatttatttttctcaccatgatttacaactggtgtaaaattcaggtctggacttggttagttataatgctatcgcaatataccgcatcttgagttgattttgccatatcctgtattgttatgtaaaatgctaactttaattgagaattgccccagtagaatatccttatttgtcctgcatgaagtttctcctcttttgtatcaattttttgtatggttcaaattagtgcgggaagaaaaggcaggaaatacaaatttaagggatatgtgttatatcataaaagaattgtatcacaaagcattaagacaatgcacagaaaactttgccaatagctgatagagcagaagggattgtataattaaataagaactaacacctattttgtaactggaaattgcattgtcagagtccctttccttttatcactagatgctaagaatctagccatgtaaaaactcccaaaacatccaaattcaaaaaaactggaatctaacgtggtaatgcagttgtcaagaacacgcaatagtctttgggcttttacaaagcactgaaaactaaatgttgcatttgtgcccttatcttccacaacttctttcttggcagcttttcttggctcacttcagacacacagaatttcaagtaatcagggaaagttgggacagaaacttcctctgtctttccatggccttttctttttcctttacggatctgtgatcctatgctttctctcacattcacattatatgtgtcagttggagaaatcttgatgcccagtttcatttgtttcttctgtcccacctgtaactaatttaggttgagttctccggctcatgtatcagagtgtgtatgacaaattatctcaaagcccagagggcctcggtggtccaagtcccagcaacaagggacacctgctgtcatgacatgggcttgacctgggttctgtggacattaaggaaccactgtcctgagaggggggtatggagctaagctaggggagggagcaggatgagcttagagctgccgaggaaacggaaagagtctataggctttaaaaaagaggagagaaagaaagaagaataaaagatgtttctggagactctgagaatagttaagagtccagggccagccagaatcaccctttcccccagctaccgagagtgccacagagcagaaattgacttggaagatattgctcctagaccaaaagtccaaattaaggggtataggcagttaagggcaagtgagggcagtagagatggttgtccgagtccagtggccatgagaggtttctcagctgcctgccaattctcttctgggacaatgccagccataaagtacaagccatgctttggtgtgggctgtagacatattgttttcccataactactgtcattcaaacaggatctagtttcttggcatgagcaaattgttcccgctgaatacacacactatgtccgctatggggcaaggcaaagcgaatcctccaaggaactggatggatttttcattctgagataagcagtttttttgtgggggcgggggaggtggagaggagccagcttcactctctgttcatgcgagttttgaatgaaatgagtaaagttcatgttccccccagagtacacaaggttcaagtgggattacccagtgggaatccagcccgattgtaatttaacttgttcgagggatctaaatatttaatctgccttcatcacgaatcctagaatcctatgtaagcagcaaaggccgagggtctgaaagtaaacactgcagttagaatcagaagtgttgcaactagcacaactgctgctgtgacgtcctacaaactttggagagtgccagaggaagctagcctgagagcacagaactggcagtcacgaggcctgcattctccagcttcgcctgccaccaactctctgagcctccaggcctcctttgtcaagtaaggacacaagcaaagcatctcagaagacaagtcattttcataactggaaatgagacagagccaacaaggatgcgtgaaaccagccacataaattgtgaaacctatgtgatcatgtatatgtacaatgttttcttaaaaaaaattaccattcctagatctaatatcaattttttgtatgattttgccccacattttgctcaaattatgcagtgtttgaaagagattctctgcagaggttggaatcacccccttgggtgctggtagcaatctgtgaaggtagctttttagatgtcacaatgattgggggtggggtgctggtgacattggatgggcaggtgcagaactgctaaacaatgctctgggcaatcccacaaagcgaccacctggcccatatctggcatgactttcatgtcccgccggacattcaaggaatccgactatgttttctatataaacatatagtatttttcacatctgaaaatatacactgaattttccaggactgtgtataaatagaggtaagattgtactttattttgctcagaactttaccaagagttattaataatctccaaaaaatcaaattatagcaaacactaatgatgtttgagtcactaagcaacacacctatatctgtctgcattgtgatatcacattcgtggttattctacaggtacaagaatctgagcctcccttgtcctttagtgcaatcaagcagagtatccacatactgaaatacacaacattttctgtaagctattttcttttcatttctcctttgtattacagttttcatgttatattaatttaaaaacatgggcaggttatatgatctatggattttataccagattagtagagtactataaaatgtttgttataaaaagtgtgttttatttgattgggttgaaaacttctgggccaggtaatcctaaagtctcttagcttttaaattttgtgagcctgtgagattatttagccaaatgccttcatttttactggtgagtaaactgaagcccattcagtctttcatgcattgtattgcattcagaaattgctgtgatcattgggaggggagaatgaaactaccaagcaaaagaatatgattttagtttattctctcctttcttttccaggattacaaaggcccaggaatagctagttagcttgccctggtgtcactgctcactcctgtgaagaataaggataaaccatgaggatagtagtggtaatggtgaaacagaaagaacacagaaagctgattctagagtagggctatctaatagaaatatcatgcaagccaccaattggagccacatatgtggtttacatttggaagtagctacattttaaaaagtaaaaagaatatgtaacattaatttgaatgatatattttatttaacccagtatattcaaagtattattatttcaacatgaaaggaatagattattattttttaaaggcttaattttatttatttatttacttatttacttattttttgagatggagtcttgctctgtcgcccaggctggagtgcagtggtgcgatctcagctcactgcagcctccgcctctgtggttcaagcaattctcctgcctcagcctcccaagtagctgggattacaggcgtgtgccgtgatgcctggctaatttttttttttttttggatttttggtagaggcagggtttcaccatgttcgtcaggctggtctcaaactcctgacctcaagtcatctgcctgcctcagcctcccaaagtgctggaattacaggcgtgagccaccataccctgccagaaaacaattattaatgagatattttatgcttcttttatactaagccttcaaaatctggtgtgcacttcacatttagagcacacttcaattcagacacagatcatttcaagtgctcagtagccacacatgtctagtggctgccatattgggtagtgcggctctagtgcaatggctttcagcagttcttctgtttctacccagttcacctgtctaggcaggagacttcccatccctgtagaatgacaatggatggggaacgggggtgcagcaggtggagtttaccatcacctactccctgcactcgtctgtgcactagagtcataggcttaaaaaatgtgagacggtttctgctaagacttacttgcaaggtcatgcgacgacgtagcagggttcaagccttggaagagaggactagtgatctgaaatcagaggtctgcctttggagaagtggttgcttgccaggaattagagggcttagtcctgtagaactttactgaataattttacaaatatagtatttttaaagtaatacctttttttttctcattgtatcttaatctcatttggctcattcatggtgcacaaatataaaaggtattagaccagatgattgtttaagtctctcctagtcgctgtcactgtctcctaatttggaaggaggtccatcggagactcagatctggtccttcaagagactgtgacttccagccaggtctctccccaagtggctctgaggtttttgaagtgtgttttcaatgcccaagagctgtctatgttcagctgtgtgtgtgcttgtgttgtggagtcgggttcgggacagggaacgtggagcttaaccaggcaaagtgctttacgtctatgaccctgttgaatcagtggaacaaccatttgaggtcgatgctgtcgttattctcattttccacaaaaggaaacagaggcaacagaggttaagcaactcctccaaggtcacagtggctgtcgccatttcattctttatggttggcgggctgaattttctttcttggtggaaacctgcctgccccttcttagtcatccttcttttcctcttcttcatgacatatttttcccttttcttcccctactcctcaaccacaaacacgcatcagatgaggagcacctcatcataaagcaggttggggccttcgaatccactctcggtggcccttagatttctcaactggttttccatttgatggctcacattccttcttcaggaagctcaggctgggaatgcatgacactctcctcgcacttggtcattctacagccagtcagggatcctgttggcctgccttctcttggggacccagaatatgggagctgttgctactactgttgcaaccttaacctgtcataagaagaaaagctgctttccaagaccagaggaaggctgctggccgtgcagcggtgccttgtggatgggcagggctctgccagggttccccccgccaggtctggtcctcagcttcgcaaaccaagggattcccagacccagagcagatcaggctcggaaaagagataggagaaacagattcatgaaccgatgtataaatcagaacacctgtttgttaatgggttaagataaaaattcctcctacaaggacacgaacatgcatgcttgcaggtcagcatatttttctctctgtggaaaaccttgtgtgaagagccagactattatctgaaggttatttaatgcacttggaaacagagctaggagacttagattattgctgaaaatctaagtatttatatttgaagaagatgggatacaaaaaggtacctagtgaaaaggcagcctctccttcacacctccccactccccactccctagccccttcccaggggcaacccttaggaccaatgtcttctgtaagttcagttgcctgaggcctccatttccttggcagggatggagctgctgtgcaggccaggtgacctgtgtcttctggttaggctcccttcctagacgggttttgtcttgacatactagcgggtgggaggtggggaggaacaaaaaccgtgggagtgatagaggccagttggcagaggaggcatgcaggggtttatgagttagaaatatctgcagagggggcaaggggtggggcgaggagtgacccagtgacaacagaaaggagtgtccccagacccctggcagggagcagacagtggctgttctctgacacttatcagcccctaaggaacaggacaggaaggaaaaccacagggtgagagaactggggagactctgtccctgagaaatcctcccaaagagacagagcatgatccaaaacctcgtgagaggcggcctggccccacagcattcgtgccatagcataggtcagtcctgtcatagagtgcaaccaggtaaggtgccttccagcttcaatgctgtgatctagagaccgcactggcgaagatcagcagcaagaaagaacaattagccaattcattatgttgacatttctagctacaaggccagtattttacaaaataaggccttttcccttaattaaggttgtgacagataaaagtatattcccagctgactcatgtcacccatgtgggcaggcctattatccctacttggcccgccctgtccgcctatgagggcttgctctgtgtgcgtactcttggcagctttataaaggattcagaaggaataaacacagggcctggttcctgcccttcatccagaagagaagactcattcatacacatggtccaagccagcaaactttagttgctcaagagcaggaaaataaggctaatgaaggaggggaacatctagaaaccagctcaagcaaggagcaggggtatttaatgtggaagagtgagaactaaaagtagccttgaataccatttctgacgtttgaagaggcagcaaagcttaatgtgtggtggttaaaggcatgactcagaagccagattacttggttcaaattctgattaaacatctctggcctgttcacacaaggcaagttacttcatctctctgtgcctcagtttcctcatttaagaaagtgaatataaagaaaatctaaaaaaagaaagtgaatatgatagctatccttcagggcaattgtgagaggtaagcaggctaacacatggtaaatactcagaacaatgcctgttagggcaaacactatagaagtacttgttacttggtgtgcgtaagagggcagggagctgactgtgggttgcaccacataaccgaaggagaatcagtgaaaaatcttcttcagtatatagactaactgtttcttttcatattagagttagccaacagaagacttcaaaaataacgagcaaagaatactccagatttcgaagggattgattctctaactcagacccatgtgggttctgcaaatctagtcattgacttgacgtttttcactctcatatcactcaggcatctcatgcttcacatgttcaaaagtcatctctgcttcccatgtctacctgctcctccttcagtcttttccataccagccacccagtcattcaaggtagaaactggaccatcagccccctttgatgcttccctctgtcttgcccctgtatttaatcagtcacaaacagatgtccattctacctcctcaatatctttggagcctgtcttttttttcctccacagccactgcctccatctgagttcaagaatcatcatcatccctcccctgtaggaactttctagcttgccatcttggtttacccctgccccatggctagaaaacctgcagggcaccttgatatagaaaaagcatgctccccaaggtcaggagatagagaccatcctggctaacacggtgaaaccccatctctactaaaaaagaaaaaatacaaaaaattagctgggcacggtggttggcacctgtagtcccagctacttgggaggctgaggcaggagaatggcgtgaactcagaaggcggagcttgcagtgagccgagatcataccactgcactccaggctgggcaacagagcgagactctgtctcaaaaaaaaaaaaaagaaaaaaaagcatgctcccctctgagaagacgcatcactgggccaggactttatgcagcccaggggccagatttccccatcgcttgccacttagctggtgctcatgtgtttgccacactggcttgaccaagtatagtggttcttcttttcagttcattcttcccacagcagtcgggatggatttgtgaaaatgtaaattggatcatgccccatttctctcagatatcacccccatgcccagtccctcttggtttcccgttgcccctgagctccagatcaaatcccagctctgtcctgtcacctgcagtcccacgctgtgtcatttctggctgcattatcaaatagccattcatcaggaaggagattttgctgtaaaaacatgctctagagtagatcataggatgttagctcttaaagagagcttagagacactgcctgatgcagaggccaaagactgtgcccctgagggctgtagccagcttgcagacacattttgcatggctcacagcatttaaaaatcgttttaattagttgacactattaaaacagagattttacctaaaatatagacccatggctgctcctcaaagattagcagatgtgaagacattggacccttctttcagggcgacagttggttgcttctgagctgccactgtcccctgagatggggcatgcctgccccagttctccccagcccgcatagctctgtgttctatactcatttatattccctaccaggcccctgtagacattggcattttcagctcctaagctcgttcaacctcttcattttacaggtttggaaggtgagaccagagagctggcacatcggtctctaggtcatgtactggatcatgaaacatctgatggcttctgactcccagtcccctagtccctctgttgaaccatagctacctctcagtggaaaactaaaaagaaacacaccatgtaacttgattaattatccttcctgctgtgactgctagccaacgtgccttttagttgttttgcttatatctgttgccacatgaaaattggaacatatggtctggagggccaagatggtattctaagaatatctcataccctgcatgaaactagaccaaagaagaaaggtagagaaacagagaggattgacaatgacagggaaaagaaaatctggacagcttttgagaggggcacagcctcttccttgtggtgttgcaggacggtagggagtcagttgggtttccactctttaagggatgtgaacatcaagatgtagacagcaggccaggtgtggtggctcatgcctgtaatcccagcactttgcgaggccaaggcaggtggatcatttgaggccaagagttcgagaccagccttgccaacatggtgaaaccccatctctactaaaaatacaaaaattagccaggtgtggtggtgggcgcctgcaatcccagctatttgggaggttgaggcacgagaattgcttgagcctgggaggcagaggctgcagtgagccgagattgcgccactgcactccagcctgggtgacagaggaagactcagtctcaaaaaaaaaaaagatgtagacagcaatgagtcagtggcacaaaaagaattgaaaggccttttcttctttaggcttgatgccccatcctaccctgccactcccttagaattactgtggacagccagagcactgcaaaaaagggaaatttgtcatttgccttggggaacaatggctttcaccaatcaagaggcaaaatcaaccacagtctcagagcctggagtaagatggaaaaatcttcctgttgtctttagaggaggaggttacatcatttcttacagaaatgagccttgacaacccccacatcccgatactgcatcctctttgtaccacagtgaattgttgccatgaagctgagacaaggcttggtatgggcaactccaggcatgggcaactccagacctcatcctagtggtgatcctgggctccttcttcataagcaatagagaagcagactgtttgggaggaggaaaaagtagtgatgggacaagttcccaaaaagaggccatgggagggagttcagtgttacatgcagtcaccttttgggttttgtctctattggattattctgttttttgtttctcattggagtctagaaatgtttaatgatacttgatggtacttcctttatccatgtaaaagtatatctaagaacttctgcatatattaacactctgtaatgattaagccaatgtaattagagtattgtatcagcaagagaaatatttttctctagacatagataaatcaaattttttctttcaaatctctgtgcaattgctccaaaatggaaatcagttttatgatttcatggattgtcatctccttacaacagcagactaatgaacatgatgatttatgcaaacaaaatatactcatttaagaatatgctcgcattggccgggcacggtggctcatgcctgtaatcccagcactttgggaggccaaggcaggaggatcaccaggtcaggagttcgagactagcctggtcaacatggtgaaaccatgtctctactgaaaatacaaaattagcctggcgtggtggcaggtgcctgtaatcctagctactcaggaggctgaaacaggagaatcgcttgaacccaggaggtggaagttgcagtgagccaagattgtgccagtgcattgcagcctaggaaacaagagcgaaactctgtctcaaaaacaaaaaaaaaaaaaaagaagaggaagaagaatatgctagcattgttgatttggtttatagactcccaaaggcctgttcctctgaccctcttaatgaatacaccaaaagagtgattaatggattaataagttagctccatcccctttcacttcctacccttagactaaaacaattttttcaaattacttctactaatgttgtactttcattaattggttggatcaacagggtagaaagctgttttctttttcttttaagaattctctgccactaagttcttccagccaaagaatgttcattcactataatacctcttcagttcaggcatttatttacttgaagtgtgaatccattgctgttctcatcgtgtctaactttgtctttttagaagtaaggtatttttccttgcctgtggttcacgcagaagtggagataatgattgtgttgagaattcagggagagcctgcaagtaggtaatagaggtgggaagtggagtgagtaatagtcagaagagaaagaagcaaggctgttggaatggagaagtctaaagagactgtactagaaggaactcgaatcattaaaacctagctgcacaggccgggaaattgtcaaatatcagagagtctacagttgaagcagcttgggaacaactctctgcagtaaaaatgctgagttgtggagaacacagtgacccaaactgacaaaataatgaaatacatggcgtttccccagtgaatggaaagctgctttttaccgtgttccaaaacactggctccgtttggtgtgtgttttgtttttatttgtaataccctactttgatgtttcctggaaactctcctttgagtctgtgagttttggtgtaagctcagtggcaatgttaccctcacctctaggctgctgtaggacacaccccggtctcattttcagtgtctcagcatactttccaatgcttccagtaatggattgtgcaaaacacaaagccaaaagcagatgggacatatgtagataagctgtttcatttttcatccctataatttcctaggtttgatagcacttcaattttctaaccataaaagctgcttctgtgctctttggaaaacacacacacactcatacacacacatacacacacacacacacacactaccaggaagcaggctaaaagaatattacatggggtttttgtgttgttttgcttatttctttccttttaaaagaagtaccttgctgctggaaaagaagtcaaaaaattgctttgaagagtatatttactagagttcagtttacttagggaactgtcgtgttaacaccgaagaatgcattagaatgcatcattctatgatacattatccgagctgaagctgaaacctagccttctgccgagtggtattcctgaagccagtcactcttagaagtgataatgtttatttaccagaactttaaatgctgattgtggtgtctgtgtctcctgcccagggggaatggcccttctgtccatggaatgtgatagcccagcaggaggtaaaagctgcccctggacagagtgaagcatgcagagggaggcggagtgaattacagctgtctctttggaccacccgtctttttgccaattaaatgtttacattatctttttgctcagatagttttcacaagtatatattcattaatacatggggcttgttccaaatcgatcatgaaaataagtttttgctgttggtattttttgttaaagtacatctaaccccaaaactatttgatgagggcagtttccctcaggctgtaaaatgaattaagggagcactcttctctgtagtcattttcttcccgcgttggttctaggctcaatcatttagatgtctctggtatctgcatagtctgggaattatacttgaactagcccgaaattactgcccagtaatcctctttctcactcaagagatttgtcaacattcatctaaccagagacttagcaagacatagagaatcatctagaagagcactgactctggagccagaaagacctggagccagacaggctctgtcacttactagtctgagtgatttggggcaagttattcagcttctccaaatattagtgaccccttgggagaagatgatggtgatacctatcttgtggcgatggctttaagagtaaaagtgtttcctttgttttcctttctccttgttttaaaatgataggaggagggagcacacttatttcaaaactctctgaactggaaggggctgtgttggaaactgtttctaagcttggaatggagcatgtgtcatatttgtcatacagcggagagggaaatgacttctcttatttctcttctctgttatccacccaatagctaggagataaaacatagggctggctaagcctaggagaagcacagcagtattaggctatgagaacctattttgcttaacctctttccggcaaaaggtggagccactgacaccaaaaaagggcaagcaggatgtccagtacctctctccctaacttttcagaccctttgatgccacagaggaagacaggcatatcggcaacatggcctcctccttccatctccctgatggttttgtcttccccattaatacaagcacagttccttttaaatgaacaaaaagtgagacaaatacatccctagaatctgacaagtatttttggaattctgtgcttttattttctcttctacctataaagtacatgaatggcagggctgaactgtcttcaggaaaatctgaaagcccggaacttattaacatgcttgacacctgcctctatgagggacttctgaagccagagatattctttgtaactgaggtccatctgttgcacagatttttaattcagatattcttccttctcaagccaaggctgagagagcagccaattttgtggaaagatttctttaataagaaatgaataaaactatcaatgctaaataaaatagaccgctgtgaaacttgggttaaatcccacagggaagagtatgtgagattaactgcattatataacaaaaccgcctttaatagctggcacgattctttttgttgttccaagggagaagcagccaagactagaaccaaagcacatgatattattttaaagtgctgcagcctctggaatttttcctcggagagatgtcaggatcccaagtcttcctgtgatttatagttgttttaaacgtttaatactttttacattttcaaagctatatcctctgcttccagcagcctaggggtgtgtttctgttgctttgaaagatgatttccaaatgggaagttttaaaactgtgcaaaaaggaggtcttacagtaccgggtgtttgagtgatttttaaatggatgaaagggagaaggctgtaaggcagggcccacggagtctttttctcagctccttatgataacccaacagagaagtggctggagagaactttcagagtatcaccatcttcacacagcaaacatcgctgaaccagacactcccagacctcagcgagctcactgtcaggtatggctggcaagcaagtgttaggttgagccatgtgaaactgccattgttgtagaccagaaatggtagaatattggcaatttcaaatgactcaacctaataattagatgaaaactatccacagtgatcaagactgtgatggccatcctgcagtattctgggagagtctagggaacaggacctaacccagtgaagtggggccagggacaagaaggggacaaaataaacccaaaaaaacccccagctttattgaggtataattgacatacagtaaactgcacaagttcttagtatgtaatttgatgtttccacacacttatacacccatgaaaccattgccacagtcagaatgatgaacctatccaacactcctaaaagttttctcatgtccctctataattccttcttcccatcacccccatctccaggcaaacacggatctgccttctgtcattatgtgttggtttcatttcctagaatttcacataaatggagttctacagcattctcttttgtctggcaacttgcactccgcataattatttttagatttgtccatgttgaagtgcatattaatactttgtccctttttaatgtaggacagtatttcattttgcagatatgccatagtttgtttatgcattcacttgtcgacagacatttgtttcgtcggctattacaaataaagctgccgggaacattcatttacaagtctttgcatggacatgggctttcttttctctttattaaacacctagaagtgaaatggctagactatatggtagatgtatgtttaacgtgttaagtgactaccaaatcattttccaaagtgtttgtcccattttatgattctatcagcagtgtatgagagttccgtttcttccatatctatgccaacattgtcttcagtcttctttattttaaccaattttattgtggtaagaacacttaacatgagatctacacaatacagtattgttaagtataggtacaatgttacagatccctagaaattactcatcttgcataaatgaaagcatacctgttgaacagcaactcctcatttcccccttcccccagtagtggttccctcctggcaaccactattctccgtttctatgagtttgactatattagatacctcaaataagtggaatcatgtagtatttgtctttctgtgactggcaagcattctaatttgagtagagtggtattgcattgtgattttaatttacatttctctagtgagtgatgttgagtgtctttttaagtatttatttgccatccatgtatcttcttagctgaagtgtctgtccaaatctttgcccatttaaaaaattgggttatttttgttaagctttgagaattatttgtatatatatatgtatacaagtcctttacaagatatgatttgcaaatattttttcctagtcagtggtttgtcttttaattttctaaacagtgtctttcaaatagcagaagttttaaattttgatgacatccagcttatcaatttattcttttatggatcatgcttttagtatggtgccattttaaagaagtctttgcctaagctaagcaaataattcatctatgttttcttccagacgttccatagttttaggttttccatttgggtctatgatccatgttgaattaatttttgtgtatgatatggggtatgccttaaattcttgtgtatgtctgcatgtgtgtatgcacatgtgtgcttgtgcgtatggagagtcagttgttttagcatcacttgttgaagaaactatcctttctccattgaactgcctttgcacctttgtcaaaaggtttccacatgggtgtaaatctatttctgaactttctcctgttttattgatctatttgtctaccttttcactaatacccactgtcaatttctatagctttaggatgtcttaaaatcagggagtgtaattattccagctgcattctttttcaaaattattttggctcttctaaggtcttcacatttctttataaattttagaatcagcttgtcaatttctatttttaaaaatatgtttggattttgattggaagtcattttgatcgggagtgattgagctttccagggggatgtgttcatgggaggaaacacatttttatatgtgaacaactggcattttaagacccatacagcatttaaaaaattttccacagccttgctccgaagtttattgaaaacccatctgtgaaaaatagtgttatttgatgccaaaggatacaaggaaaaataaaatgttctaattctggtccttatttcctatgatttcaccttttttttttttttcaatgtcattccagagagaggaaagacagttatctcaggcagtcttttacccctgggaaaagaccacagacacatgggagggtttgtgctgccttgagtgaaaagagtctgttttgttatgctctccttcccccagctggctggaggctcatccaccaagctttagactattatgctgtgtaggattttctaccattatctggtacaggaggcagaaatcaaacccctataaggcttgcaagttcctggacccgggagatcagctcagtgactgggctttctcatgcgtggtaggagagtggatgctgggggtagccaggatgaggatggctctggtgagctgacaagcaaagctacaaatctggaattttgtgaaacctctcaatttttaaatgctctttctgtagttttttgaactggacaggccaaatgaaacacatctacgggccaaattcagtccattgctaccactgtgcagcctctgatggatgggctcttttatttgcttttagggtcagctctttcatcagctccctaaagttttggttttttgttgttgttgttgttgtttgagatggagcctcgctgtgtcacccaggctggagtgcaatggcatgatcttggctcactgcaatgtctgcctcccaggttcaagcaattctcatgcctcaggctcctgagtagctgggattacaggtgcccgccaccacacctggctgattttttgtattttagtagagaggggttttcaccatgttggcagggtggtcctgaactcctgacctcaggcaatccgcccacctcggcctcccaaagtgctaggattacaggcatcagccaccacgcccggcggttatttcaacagttgcttatggagcactcctgatgtgccaggaaatgctgggtgcacaggaaattgaccagtggtggggagagcctgccacgggttctagaggctcctgcttcaatgtggagctcaggcgtggcagagagaggcatcccagtgccaccacctactctcacctgaatctgccccttcctcgaatcttcgctgtcacttatttcaggccctccaagaagaggatggctgatttacgcttggaaggctcccagaaagcttcttcgaagagatgacatgtgagctaattattgaatgtagagtaagaattagccagctgaatctgctctagaacagtgttggtcaaaccttgctacctgttagtggaacatgaaatcaatttaaaataaaagaaggtagcaggtagtgaaggtaagtattttttgttttgttaaactttttttcagtctctctcacacacacatgcacctgcttcttttaaaggaaacttttaaaagaaaattttggttaaacatatataaaaacagaatctggaaaactgtttgattttgagaatgttaacaaggagattaaaagaatatttattaaggataagcctatgttatttctgcagtcctttataaatatgccccttcacctgcttatttgcaacactaagtaggtactgaactaagtaggtactgaatacttgctaggataatcatctgcaaatcactctattactgactgagctccacagtaatcatgagactaagcaagtgactttaattctcttgactttatctccttcattgaaataagtgagttggtctagaaaaggtcgtgttgaagcctaagtttcacagagatgctttagacaatctccaaacaatttacagaaatagctaaatttgcccatttctgtatcgttagcacctaaaatgtacttggcaatatagcaggcctcaattaatatttgctaaatcaatatgtctgtcttcagggtgccattgtattttatgtgagattgggcatatttgaattcactaataaaattcttcactgaattctcactttaggcacaaaatttgaaacattgccaggcacattaacctgtgcctggagtcccagctaatcaggaggctgaggcaggagggtcacctgagtctaggacttctgggctgtagtgcactatgcagatgggtgtctgcactaagttcggcatcaatatggtgacctcctgggagcagggtccaccaggttgcctaaggaggagtggaccaccccaggccagaaaaggagcaggtcaaaactcctgtgctgatcagtagtgggattgtacctgtgaacagccactgcactctggcctgggcaacatagcaagaccatgtctctgaagaatgaaattttttaataattttttttatttgaaatattgcaaatcctagaaaattaaaaacatatcaagaatcacacaatttcaaagccaaatgggattcccatctgtgaatctgcatggcagcacctcctgtgcttcgtcaggttagttttgcattatgtgcagctgcacggggaatgcagctgctacccaaaatgcaactgctccacaagtgttttaaattactctcttaaacgatacttcttgggatctgcttcctaccagacattgtgctaggggctagctgtgaacaagaaagatacagctctcatcttcctttaactcttagttcactgcggtatatgccacatgctttcatgctgagttaatacctgcttgcaggttagcgtctttgggtagaccctgtgatcaggctttgcctgcatctgtctgtatcacatgcagtcaggtcactgatttggaagtggtctgtttgattgatgtggattctgtgagacagtcatcttccttgttcctgattccaaacttgtgtgttaatggaaccaagtttgctgtcaagtttttggttggttttgggttttttgctagggtgatagtgtatttgcagtcagtgaaaacatctgaacctttccttctgaacagcattatagccaggttgaaaacattgtatacatttatgattgatttttttaacttgatgatatcacatttatcccatgacaaatcttgttaggatcattccatcaatctaatgaagttattttgattcttaatatgtcaatcaccatatcactgccccttacagctttgggaagacagcaaatttaaaagcctgccttctctctctcttcctaggatgctaataagagaactgaaagtttcatttataagattgttgttgagtcacagctttgaaggattttgcttggtaaatttgcgtgacatccatacttttttcatttctttggtcttactgccaagccactcaacacagctgaactccatgaaagaaatatgcttttgatgcctgaagtcagctgccttcttagcgttactgataatcttacccttcttctaggcaggtttggcattaataaggaaaacataagtccatcagaattgttattttatagtttataatatgcaattgaagcttcttaatctttctctatactctttattacttagtaaacagcagcaaagataatatcaaggaaccataggccaccttgttttcttcagctttaatatctgtttacatatttatatatttgatattgaagatgaaactaaagttataagtatttttaaacaattttgaaaattttggagaacaatcatcagtaggaaataattacgtgattaaggagttcattttccctatttagaaaagggggaagactgaagaatgcaaaatattatgttcacatatacgacttctatataaaggaatcttaaatgtcttttgctaataacctgtgaagaagcagtgttgtcattaatgttgaacttacaatagttatctgagcattttggtaaacagacaaggcacttggaattttgtctctcaacatctgtactctgcttttaacttcaaaaggtagttttgaagtacatgtaatttttgccatctgccactgaatttgtgatttagaaatattagaagcagggccacattatgactttcttgggctgcaggctcttttgcctttgtggcaaaacttctcatgactttattgtgttacacaaatgctaagtgttcattataaggaatccaagggatgtagaaaagtaaaaagaaacaaatcataaattctatcatttaaaaataagcctcattaatattaaagaaacgttgtgttagataccaccctaagcatgtttgcagatgggaagatagatggatggagagatagatatgctttcaaagaagagtgatcatatgatacaggctaagtttttatttatatttatttttttgaggtagggtctccctgtgtcactcaggctggagtgcagtggcactctcacagctcactgcagcctccacctctcaggcccaagcaatccttccaccctggcctcccaagtagctgagaccacaggcatgcactaccatgcctggctaattttttatttttatttttgtacagattgaggggtgtccctatgttgcccaggctagtcttgaactcctgaactcaagcgaccctccccccttggccttccaaagtgtataggcatgagccactgcctcagctatacacactaatttttaaatgtaaaaaccattacacttaattttacctgattttaactggagaaaactaagtgagaattaaggaattactgaactttgaacaaacattttttcacataaaaatgttattttttccccctctatggttaagtaaagagataagaacttgctggttttcattttgtgtttttttttccaattatgtttttgtggtaggcactgttgctgttcacccagttttcttcctcttctgggatataggagaatcatatttgctcagtctcttcaagttagatgtgaccttgtggcttgctttagtcacacaacatgagcagaaacgaccattatggatgaatgcatttaattaccgggtctccagtctcaccctttcttctatcaccttggtgagcctgggtgctcatgttaatgtggtgggcgcataagatcaacacagcacagagtgcagagccggcacgtgaaaggcacagcccttacccccatgggcctgcagtgcagggagtatgagcatgaaatgaactcttgatcggttaggtcactgagacttgggacttgtttttaaccatagattacttaggttatcctgatgctatcattttcatactagacagtatggacttcctttctgccatgataaataaggtcattaagaactttcactctttttccttccttccttccctttagattttagttagttacattgctgttttcacatagtcaagtatataatatttacattctattctataatctagctttgattttgattagttatgttattttcatatagttgaagtatataatgttatgttcagttgtttaaaattagtttggtttttttcttttttgagacggagtttcgcttttgttacccaggctggactgcagtggcacaatcttagctcaccacaacctctacctcccaggttcaagtgattctcctgcttcagcctcccaagtagctgggactacaggcctgcgccaccacatccggctaattttgtattttcagtagagacggggtttctccatgttggtcaggctagtctcaagctgcccacctcaggtgatccacctgcctcggcctcccaaagtgctgggattacaggcgtgagccaccatgcccagcctaaaattagttttatatttaaatgaattcagtgcccagtactaatctttttcctatggctttcctggtactgatattgaggaacagatcaaggggcttagtggagactgcctggcagaggggaggggtattttatcatttgcattgtttagaattgcctgcacatggtgatgtgaaaaacagacagacttttaatggttttgttactaatttaaaattctctataaacactgcatcctttattgcctgcatctgaagcaaaccattttcactggcccccccattggtatgcactgctgatagctttattttatgcattgcactgactagattgtcaagacttttcaaggagggctcctgaacgatgaattttttagttttttttcatgttcaagaatatctgatgattaccttacctttatacttcaatatcatccctaggagtaatatttatgcactatactttattccccttagaattttggaggaattgtttctttatcttttgcatttaaaatacttttgaaaacaatgactgactttcccctcattgtaggcaacttggcttgttctgcttgaagaattatttcttggaactggaaatttaattattgaaccagggtacatgtttcagttaattgtttcatattcattttttgtaaaaacgaagtatgctcttttgacttagagctctgttgcttgctcattttagggatattttcttgtattggatctttaaacactttggcctgggttctctacttcaggaatactcattaatctttctgatggattatattttttctcctctatgtctatcatttttctctgtaagttttgccttttatcttgatgacctgaaggcttcctaggatataaataattttgagccatgttaattctattccttggtgtttctcacttattagtttattccttggagattgtagatttttggttttggcccattttcttccacataatgctctatttttaattcatgtgttactctgatatgttactcacttgccatgctgtttcattccatcttgcatatgtttgggtgactgtggcctttggggctctgatccactggggtgatttctccttgacacccttctgacccctgtgtattaccccttgaggaccaggtatttcctgtcctgttcacttttcttcaggctataggcacatgtaagcaaaagagcagggcaggaaagtgagctcaccaagttgtttacgcgtaggccaccctataatgcctgtgctgtgcaatctctcctgagaacatgcagaatgtcttctcattctgccagggacagttagttctcgttgtccacattttttatctcctgtcgcttcatgtagcagttaccatctccactctgctgaaattagaggagaaaaaaatgtaagaaacccacttaattttttcctctttagatttggggatagtagagtgaatctcttagagttgagtttgggtgaataattgatagagcttcaggaaggtaggaattggaaagtggctctgccatcttttttgatgggcttcatttttattttattaccttttcttcattcccttaggtgttaggggatggagactctggggtcaggcctcactctgccatatttacccagaagccttcttggggcttgcctgtctttctcttttcaaatgaaacatggatgtgggaaaggggagttcattgtagcccagtttggcataaaaagaggtaacagcccacatctaaccttgacaatattttaccattatggagtttcctctctttttaattttctgttcaccctcagattatgcaatgtaatttctctggttttaaatacaaagtaaattaaaagtagaagcacttggtaatactgtagctatagagaataaagctaagtgagtatgttatcattgtaatgaatcattccttttcattcattcactcatccagcaaatatgtagtgagtgcctactatgtgcaaggcactaccctgggtgcctggagtacatcactgagcaggatggacaaagctcccctgcctgcgagacacttacattccagcaggcatgagtgtgtagggttgggggcaggcagcgacagtaaatacagcacatctataaaatatatcacacgttacaaggtgatttatggacaaagggaatgacagtggaatgggagttgcagtttggaatagggcagtcagggcagctgccctgagaagttatatttggtgaaggggtcagtgaaagagtgtcccagggaaagggaacagctcgtgcaaggctctctggttcgcagctggctgctgtgttcaaggaaccggatgaatgacaaattggtggagctgtgtctggtccatgtgagagaaatgaatggcccagcaaactgtaacattaattgtttttactgttttgaaaatttactgtaccagatattcatttcacgtttttgtttgtttgtttgtttgtttgtttttgtttttttttttagagggagtctcgctgtgtcgcgcagactggagtgcagtggtgcgatctgcacactgcaacctccacctcctgagatcaagcaattctcctgcctcaacctcacgggtagctgggattacagacgtgcatcaccacgcccagctaatttttgtatttttaatagagacaggttttcaccatgttggccaggttggtctcaaactcccgacctcaggtgatccacccgcctcggcctcccaaagtgctgggattacaggcatgagccaccgggcggtttccatgtgtgatctttaaaaggcagaaacaaataagcaaaaatcattactaaaggcccacgagggttgtttctatcttagaaaatgtgtaaagaaaagtgatacaacaataaatggtttgatttaatgagaagtcaaaaatcataagatctgttgaaaataacaaaatcacttctaaaaaagataatatgttttattgaaataaagccttagaagtcatctggttttaccttttacaaagaagaaagcagtctaagagaggccaaatgacttatcccaagctatacggctaggtagtagcagattcaaatttatactacccaggcttcctaattcttagcccagagctgtgtccaccctaccacccaccttttaattcagtgcgagctcaattattgctaacagttttattgttgaccttccatggactcgatagtcaaatcaagtcttccattacaataaatgggatttatttgtattttgcaacataaccttgttctttggagtgggtttcacttaatcatcctggaaatcggttttagaaagactaaacatgatttctccatctctctgtgaggaccaaattgttctctgtgattatctatcagaacaagcagaacaaggggttctaattagttttccttttgaggtttttttttttttttttttctttttccaggcagtcagtctctcagccaaagggatttttctgcagagcctttgtactcagggaccagggttaattcatgagtcctgggaggtggctgatcaggttagtttttccagcctggaacagccccgccctacccctgacctcctccactccaccactctactcactccactcactccactcacattagctacagagaaactggatgttgtcagccccaggggtaccgtgagacagctgggttcagagtgactcttgaccttccctctctcactctctccctccctccttccttcccttcctcccttgcttctctctttctctctcttttttttttttttcctttgcgctcatcagtttatggtctacttcactaattggtctgtgaaaagcttcttccttttccattcatatactcactcttgttccccctccctctcatagataaggataactattctgactgatatgtattcctttatttgtgtgtgtttttgtaagtggtgttttggacatacattcttttttgttttttgagacagagtctggctctttcacccaagctgaagttcgatcagtgacacaatcagggttcactgcagccttgacctccctggctcaggtgatcttcccacctcagcctccccaccgagcacctgggactacaggtgtgcaccaccacacctggctaattttttgtattaatttttttttttgtagagatggagttttgccacatttcccaggctagccttgaactcctgagctcaaacgatccacccgcctcgacctcccaaagtgttgggattacaggcgtgatccatgggtgcccggcctggacatatattcttaatttgcatttgtatagacctgattcttttccttacattttttgctctccactgcatttagtccatcccctctaactctgccagtattccctatgtgctgttttgtatttctatatctcttcccccagcaatgagcttttagattgcttccaactcctttcttccgacagtattacctcatataaacaacctcatagtgacccctcatggatctgtgtaggaattttcctgagatggagatatctatacctatatctatatctcccaaaagagggtttctggattataagatatacgtgtatttgctagcacaaataacgaagctttacacaaacaacctaatacatgtcccttacaggtcttttttagaacttttcttgggtacgtctaacagaacaagattggaaagtacattcaattttacccacactgccaacttgctggccagtacgactgtccgatctttatttccattggcggtgaacaacgttctctacatcacgtcccagcctaagcttggtattgtctagatttctatacatataaagtgctttatcattgttgtttacatttgtttcttaaatttctgcatttgagcatctctttatgtgctcgcttttgtgtttcctctaattcgaatcacctgttcatacctttgttctgtttcctgtggaggttcttacctttgctgttggttttcagaaacaccttacccagcctagatagtgtttcccttattggtcttagacattagccttggtcttagacatcagcttggatcacgtctccttcattgagcagaaatccgtaattttgatataaaaaatttacctttgggagattaattttaaaaaccacttctgaccacaggccataaagatactcctgccttattttccatgaactttatagttttaccttttacctttgggactttatctccatgggatccaccactgttcatggtgtgatgctctaggccagttttcttttcctctgtaattagctagttctcctcagtttggggaaagcctcttctttccccattatggaattttaattgtcacaataggaattggcatctttatattataacaatgtcatcccatctagcacaacagggactctccttttagtcagatcttgctttatgtcttttaataaaggcttaaaattttccccatgaaggtcttatacagtctttattaacttcatagatcctttatccttctcattgcttattgtatttttattatgttttgtatttgattattgtaagagtgttgaaatgctgctttgtagttttttgctttaagttgatcttgtatctggcaattttgctcagtcctcttactctaatagattatctgctaatcctgatatttttctatgtattaggtcatattgtctgaaaataatgttagttttatctcttccctagaaatgcttattatttataactaactaatttcttttttttttttcttctttttttgagatggagtttcactcttgttgcccaggctggagtgcaatggctcaatctcggctcaccacaacctctgcttcctgggtccaagcgattctccagcctcagcctcccgagtagctgggattacaggcatgtgccaccacgcctggctaattttgtaattttagtggagacgggggtttctccatgttggtcaggctggtctcgaactcccgacctaaggtgatctgcctgcctcggcctcccaaaactaatttcttttctttatagcactggtcaggacgtccaatactgtattccacagtattggatcttatacagtccagacaagtgtgcatccttgtctttttaaagagaatacatttaaagtttcttcaccaaatcaaatgcttttacaatcttaaccaaattaagaaagtttcccatattttgaatttttaaagaaatatttttttcaaattatagttatgtgtcaaactttatcaaatttttttctgcatctattaagataataatgactttcctctttggtggattgatatattgagttaagtggtagattttatgatgttgaaatttattgcaaacgtaggatacattctacttgttcatgatatgttactttcaattttttgattcaattacttaatattttatttataatttttgcttctaaaatcgtaactgaaacaagcctataatttttcctcttcttgtattcttaccctgtttggaataaaaactgtagtatcctcataaaatcagctagatagcttttgtccttttttgattttctggaacaacttacatatgataggaaattaagtgtttcatgagctttttctttttccccctttaacttgtccaaggtccacaggatccatgaacatttgatggagcttacctgtaaagccatctgggcctagggctctttgtcaagggagggctttgtttgctatttcagtgtatttcatactttggtctgttcaagtttctgttttttcctgcaccaatatccaacacttctgagtgtttagaggtcattgttcagcaaactttcactcctcctaccccgtgggaagatttaattccctttcctgttggtgttgggcttggccacatatcttgctttgatcaatggagcattagtggacttgacatgggcagaggacttaaatgtcctcacagcaggatttagccctgtcttctaaaaagcggctgtgctggaacgggacagtctcttcgctcagcttttttttctagtcccgcacacctgcagcatatgacacttacatcagtaacagtggttcactgcagccgtgagctggggtgactggtatattaccagaccctccggaggaatgtatatagtttttaaaagtgctaccccatgaccaacccagtcaccgtcgtaaataaaaaaaaatacctgcttacaacatctcctctcatatcacaaaataactgaagttgagaaaggaatttcatagttaaaaaacttttttgactcttccagcagctatttgtgtgtctgctgcacctcttcttagccgttggtcttcagcttctcaactgtgcttttgaaccctggagagttcccattctcagattacctgtaaggtgatcacatcattgaatgcaaggtgaaaacaggaggttgaccagacaggaccctgggcctgtggactgtccttcactcacagaacccacatccaaccagttattccagtgaaagcaataaggaataggtaggaagtactgctgcacagagattcgttagaagacatggctttttttctggaacagatgaagtcaaacagacagctagtggagatggtgagtcgggaacttgacttggagggcttttttgctttaagatgatcatcagctcctggaaaggtgtacgttgagttcccttttgtgctaggcaaagggctaaagactgaggggaaggaggtcacagaagtagaagagctggtctctgcccataaggagcttcggagtcagcaatgtcatatacaaaacctggaaaaattatgtgagaaactttcacaaaatgcaatagggattagagaggagatttttagttttgaggccaaaacagtgattgataggcatggctgagggaggaggaggtagctggagaaggagggagaatgctatgttgttttcattcacgtagtgaccacagaaatgagggatggaggggcgagagaataagttaagtcagggcgggggtgggggagagtagggggaggtgtttccattttcctttaagtggatccttggcttcattgcagtaaatggggttgtcagtatatattgccccttttgaaaccgacgagtttcactgagaatgggattaaaagattgcatgaaaaatttaggatctgtataagggagaacattttatacagccctgtatgagggccgtctaaaaggagttaaattcccatttgggattttttaaaccaggatgaacattctataccacaatgtctggtggttttaaccagagatagtactgcctcaccccagggtatgtgaacatgtgtgtttgtggtaaggtaggggtatcactagcaattagaaggtgcaagccagggatgctgatgaccccgtcatgtactggagaagctctgtacagcacattgcctgcctagaatgctaagggcacacttgtggagaaataatgcacttcctaagcttcagtcatttggggtccccttgtttaatttttgcggtatctaggtaccatttctaccactaatttaatgctttttttcttttttgtctttttattcttttttttttttttttgagacagtcttgctctgttgtccaggttggagtgcagtggcgtgatctcgctcactgcaacctccgcctcccagagtcaaacaattctcctgccttagcctcccaagtagctgggaatacaggtgcccgccaccaagcccagctaatttttgtatttttagcagagatgaagtttcagcatgtatgccaggctggtctcgaactcctgagctccagtcatctgcctgcctcagcctcccaaagggctgggattacaggcgtgagccaccgtgcccagcctaatttaatgcttttctttaaatttatttttatttatgtatttatttatttatttatttgagagggagtctctctctgttgcccaggctggagtgcagtgatgcgatctcagctcactgcaacctctgcctcccgagttcaagtggtcctcctgccacagcctcccaagtagctggaattacaggcgtacaccaccatacctggctaatttttttgtatgttagtagagacgaggtttcaccatcttggccaggctggtctggaactcctgacctcaagtgattcacccaccttgtcttcccaaagtgctgggattacagacatgagccaccgcacctggccctttaaatttatttttaactgacttttaagtttttagttgtcattctatatctgcattttaatttacttattgtgatccttgcaatcatgagtttgaaatgctattgatatttttctaatcatattaaaatagatgactattgcaatacagaatgttcatcttgcactccgctagtggcatgcatgctagctttgagaagtagtagccagatggtcgcagtggattaatttatggcttgacctgattttatgtagtatatccttgagagttgacatccttgggactctcatttttaagtaaccttgtgttcagcagaattcacgaactgaacgggtctcatgaggatactgtccctgatagaggtcagacagcacaaacagctgtgattgcctctctatatgtgcaaagatgtccatttggaaaggcttgatctgcttggtggggtggtgcttatgtgccaattacctttgctccggcctgtgtccacagactgctggccatctcccagttatgtggccctatttacaagggctaagtgaccctgaaagtgtggaagaatcagagcaaactctgtccttacttccaaataattggctcgaagcatatgttgcattcatgttggccaagaatgagagagaaggatgacagagtatagcagaaacacagacactcccttcccaacacccaaccaacagaacgaaaatgcagttagaaacaaaatcaaacccagccccacaggctcttgcagcaagcaaacaaacaaaaaacaattacagctttatttcaaccactttgaaaagtggcaggcaaggaagggtgcaccccaccgtagcccctcagaagcagtactggaaaaggaaggcgagaggaccagttcctgagggttcctcctaatacagatcaatatgggaagcagctggttgaggaggtgagtggatagacttggtaaaagttaaaaaaacaaaaaacaaaaaacaaaacccttggcagagttaggaaggcacctggggaggccatctcctagtctctgtgttgagttacaggaaagagaccataggagtgagtctgccctggtttggcagagtgggccctggtctaagacatttaactcccctccaaaagaggacagagtatagagcccccaaggacaggcctcatgactcctgcctctcctccatggcagaagtgttcatggaaagcagcagccaacctaaagttgtagctcagaggtagaacgacacctggttccctataaagtgaggagagtgtcaaaagatacatcagcttgctctgggagagcaaagagcagttctggacagagatgttcacgttataagtatgaacaagatggcagtgagtgtcatgactgttctgtgaaatgctgcagcagaggaatgcaagagaggagcacagcttgttggctgagcacagtggttcacacctgtaatcccaaaactttgggaggctgggtcacgaggatcagttgaggccaggagtttgagaccagcctgggcaacacagcaagaccctgtctctattaaatatatatatatatatttttaataaagaaaagaaaggaacacagcttgcaaaaataaacatacaaccaatctggtctataagaaaacccagtcctagaaaactcaacctcacaagtattttatgctatagaaagactcagcatcaattgagtagaaacaaaaactcaagatgtcatcatgataaaacaacaatgggattcttttaatttttatttttaattgtggtaaaatgtacataacatagaatttgccattgtaaccatttttaaatgtacaattcagttgtgttaagtaccttcacattgttttataaccaatctccaaaagtcttcatctttcaaaactggaactctgtacccattaaacaataattccccatttctccctcccccaccccctggcaaccagcattctgctttctgtatctgaattcgacaactccaagtacctcatatgaatagaatcagaaagtatttgtccttttgtgactggcttattttacttagtgtaatgtcctcaagattcatccatgttggatcatgtgtcagaatttccatcctttttaaggctgaataatattctattgtatgtctctgacattttgcgtatccattcatccagtggatactcagtttgcttccacctttggctattgtgaataacgctgctatgaacataggtgtacgaatttctctttgagtccctgcattcaattcttttgagtatatacccagaagtgggattgctggatcatatgctaattctatttttaaatttttgaggaactgccatactgttttccacagcacctgcaccattttccattcccaccaatagtgcacaagggttccaatttctccacacccttgccaacatttgggacttactgttttttgttttgttttgttttgttttgatagtagctctcctaatgagtgtgaagtggaatggattttttaaaagatagagccaagaaaagaaataaagaacaaaaacacaatacaacgttaaaaccagaacacacacacacacacacacacacacacacacacacacacacacgatggacatagctgaaaatcaaagagtgagataatcccaaggaggggattaaagcaataaggacaatataacagccatggaggagaggcacagccatccagcatatggagcaagaaaagaatgcaaccatgtgacccaggaagattttcccaaaaggaagaaacaactgaatctttggttagaaggttatgccagccaggcacagtggctcacgcctgtagtcccagcactctgggaggctgaggcaggcggatcacaaggtcaggagatcgagaccatcctggctaacacagtgaaaccccatctctactaaaaatacaaaaaaaaattagccaggcatggtagtaggcacctgtagtcccagctgctccggagactgaggcagaagaatggcatgaacccaggaggcagagcttgcagtgagctgagatcacgccactgcactccagcctggatgacagagcgagactccgtctcagaaaaaaagaaggttatgccacatatctgaaagtgcagatgtagaatggataacatataccctggtctaaagtttcagtatttagacctcagacaggaaaagcaagttacacaaaatactggatgactaagttggtatcagaattctccacatcagcaacccctaccataaagtacgaacaaggtctacaaacttttaagggaaataacattatttaaataatataatttaaaattatgaatataattttatattatactgttaagaatataaaaagataaaaataatataaaattgttctctaaatattaagttattattccagtgaaggcaataagcaggatgccttgacctgaaagaagtcaagagactatggcagtcatgagcattgcttgaaaaaaaaaaaaaaaaaaaaaaacctccctgtgatgaaattgacccaaatgactcaaatcagaagaacagacccaggagtagaaaagccacagatgaagaacagtaacaacagcaacaacaacaaaacactggtgagcattcaaccattacaatgccaccttaggactaaacaatggggcaagggggcatggatgattgttaaagaaatgtataactattaggcatctggcaaaataaaaattatgtaagtgaaaaaaaatcaagtgtgaggaagtggagaggaaatgtaaagtaattatagagtatttctataaaaacatgcagttaacccttgagttttcgtaacttttttctgtgcattaaattgtgtgtgtgtatgttttcaagtatgttaacttgtaaccgctggtcagaatgtcattttgtttcacttctgctttttcttctgttacatccaaacaaaattacatagctcttactggaaagaaaaggtcatatgttatcattttaaatgaacccattaccctctatctagccttctaccagtgtatgtgcatacagagatatccagaatgatggtcaccaactgtaaacacaatagcgggatattggatgatttcttttcttctttgcgctgttttctgttgctttattttttttttaatgagcctatgtttttatacaagccgtaaaatcattgctgttaatctcaactattgatcagtagtgtcatcagtattctaattgcgtcatagtcattgttttttaaattgtagtgttgacaaacaccagaaagagcccttgacaatatttttgcaactcatctctaaggtgctggccgctgcccagaggccaaagacatgggctgtggaaaacatcagctcttgtaataaggtgcctttgccttcttattgaatcataaatcaaaacacaatagtggactgatgagcatgaagtagactgacctgaatccctgtgatgctgatggatgggagtatagtgtactgtgctgtcaaacaaatgtctgaacctagcaaatgactttggatgtttggagtccgtctcaatctctgcacttggctgctgtgagtgcctttcacttcctccattgcgattctcctgcctctgggcctttgcacatgcaattctctcttctcgagatgcgccacgccctgttcctccttcatcacccagctcctcctcctagtgttcagggcttagctttagcctccttcccctggaaggccttccctaatgaagttaggagctcctctgtataaccaaaggcactgctcactggttttgctgggcacatttataaccattcactcaatgtcatgcttcttagcagactggcctcaggcaaataagaatctagttcaggaagtgtaaggtcagatttcctcgttgccccgtctcatacttcctgttcctcttctgggctctgccagaacggtaactccactcttgtggcctctgctatgaacaaaccccgctctcttcccttcctgctaccctatggcctcttaggtttattttgttctcagcagccctcttggctctggcttctgttagcagctacacgttttctcggtaatatttcaagttcaacctcatcggcgagggtagctgtttggtttagcctttgtcctctagcacgtgcctttcctgcagggaggggcattcccagccttggaacaggccccatcactaaggccacagacagtgccagagggagctggggtctgtgcagccattcttgaattcccccagaatgccttgcctggccttgagtaaaagggatagaagtgaaaaaagcctgttacaaagcagcatgtacgaggtaacccttcatgtgtgttttatatatcaaagaaaatagactagttattatcaatgagtttttctggtgggatttctagttatttttattttgttgctttcaaagtttctgtaacaggcagggtgctgtggctcacgcctgtaatcctagcactttgggaggccaaggcaggtggatcacctgaggtcaggagttcaagaccagcctggccaacatggtgaaaccctgtctctgctaaaaatacaaaaattagctgggcatggtggcagttgcctgtaatcccagctacttgggaggctgaaacaggagaatcacttcaacccaggaggtggagtttgtagtgagccaacatcatgccattgctctccagcctgggtgacagagtgaaacaccgtctcaaaaaaaaaaaaaaaaaaagtttctgtaaaaacattttcacagatacttaacagcattgaagccctgaatcatggcgttgtacagagcagcccccaggaagaagacaagagccaattggctctgccatttggaagcattgccttcttctccccacgattctcatttctgcccccaaatgatgtgtttgttgccttgctcatttcaccggggtgtctttttcctcctcaggtgacagattgactgggatcccctcgcacatcctcaacagctccccatcagaccggcagattaaccagctggcccagaggctgggccctgagtgggagcccatggtgctgtctctgggactgtcccagacggatatctaccgctgtaaggccaaccacccccacaacgtgcagtcgcaggtggtggaggccttcatccgttggcggcagcgcttcgggaagcaggccaccttccagagcctgcacaacgggctgcgggctgtggaggtggacccctcgctgctcctgcacatgttggagtgatggtgcctccagcaaccgctggggagtgtgtccctgagtcatgtgggctgaatcctgactttcactcagagcaggtggttttttgtgtaggtttgttttttatttttgatgatcttcagatggaaggagaaaacagggtttccactagacattacttgaaaggccagattactcagcagatctcccatgttggctcaacaattctttgtttttaattgcttgaagattgcattgttgtaattgttcagtttttaaatgtgtaatggcattttaatagactagtaaatcacagtggttcaaaatatatatccatatatatatatatccatatatatatctcatgtcatcacattacaggcaggtgtctcatatgtaaaacatttacctgaatgttgtctgaggactgaactgtggactttactattcataatgataaaataataaaatgcgaattactatatataatgtgcctcactcatgagaaagtaccgtgttgggtttttttttttctttctcattcctgtgttgcatagattaagggtgtaaaattacaatagtcttttttttctttttggaacagaattaatagtaacagtgaaatggttactttcccaagtcaggataaatagctcaggcaggatgtctgtattaaatattgtaagacactaaagctccctgcaaagaccagttcaaggaccagcatgcatacccgagcccttcatctttaaaagatcgctcgagaaaatcctgtgctgtttattgaaagcattaagtcaggggacgagagggggtgtggtctttccattgaagccagaatgactgaagtgttgtgctcctaaggagtatgatttagtcttctgtccttttatcaatagcacatggtgtttatagaatgctttactgttttcacggcttttcctgtatgtgatctcatttggacctctcagcaatgctgtggggcagtgggcaaggtggttcacctccttctgtacagagattgagtgattggcccagggtgaatgaggttgggtgccggctcctgagcctttccaactgctccacagggctcctccccttctctcttgcatgctcattgaagaagcttgaatcctgctccccgcctactaggtgtatggccttggacaagttacttaccctctctacacctcagtttcctcattggcagaatggggaaatgattgtactcacctctgaggtctttgtgatgattaaagcaataatgtccgccaacagcacatccagatgcagctcattgtcagctttcaggaaatggtagctgttaatttgccgccactgtggctgaaggtatggttagaccacaggcaaagctgaatagtggctgaaagctgagggcactgtgggaggagctactattgccacatttcttactaagctttaaaatgggatttgattttataaactttacaatggggccagtctgtgatctatccttcttaataattacggaatctgtttcctaattctaacataactcaggatttttcaaaagggagaaaaaaatcatgttttttatttctctccattccaagaataaatttatggaatggtagaattgagcacgaagtgggtacttaaaaagatgacaatagtgtgtggataacatcctttcaggcatcttgtaaccatattcctgttactaaaaaagagctgctatgccacagtttattcttccagtgaattcggttcaaaaggatagtctactggccttatcagttcaaatttttcattttgtagcccagccaataattcattatcttataaaattctcatgcttttggccatatcactgtgcccagtgatagactgtactgctgtggcatcttcagtgaatcacttgtcattttgaacctgggacttattacattgctgtcttccccctgggtttcctaatagagagttgctttggcttttgttctcacagctcagagtcacattcatggatgagtgagtagagctgggctctgctgcgtctgactagatggcattttagaagcaggtctgatgattagctgggtcatctttccgccattcaccatttgcaaggaatctgtcacgcataaagacactcgtgggctctgtcagcagtgagagacaattagtgaagaacaagcccacgatgggccagacagacagggccgagggggcccttagagacctctgacttgttgcccttcacaagcagagtgtcttcaccaccaaatggcggcagcccctccctggcctgctcacgtgcttgcagaagatttgcagagtggaagaacagagcagctgaatccctatcttggtactacctctggccatgaagaataatgctacatagcagctgcctacctcctaacagaactggggaggtgaagagcctgcagggatttcctgtgtttgtatgggagaagattctacaatttcagagactgtttatccccaagaaaactgaatgaatgcagcgaggtggcaagagcatttgccggcactgacagaaagtatatgaatatatagtcttgcaccactttgggttgggttggagtgtgtgtgtgtgtgtgtgtgtgtgtgtgcatatgcatgcatgagtgtggcccttcatgtttttaaaactataacttttattaattttttcaacatgaagtacatgtttattatggcagtttgaaaaaaaacacaataagatgaagaaaaataagaattacccctactcccatctaagcactgtacatcccaatttttatccctgtcctccaattagttttctctgcctgcatatccttttcataaaaagaataggattttctctgcatttccttataaaaagtgttatattttccaactgataatacacttatttttttttgtcgatgtgggactatttagagagactaaactgtgtaattaaaatgatgcatctttttaatattcctcaatggcatactccaaatgatctttatattcatggcttaaaattaactaaattaagttttcaattttattacaagaatgggattatattgtacctgctgctttacaagtggcatcttttatataacatcaaactgtctttctgtgtcattatttctctgtgccaatgatttcaatatcctttgtgttcacaacacactttcgagtcctataatttttgtggcatgtttgaagagataaaaggacacttagctactaaaaagatgacaataagtatagcaatgtctttcactctcaaaaccattgtcccactttttgctccatccccgtttggaaccatgttccaagcagtagagctgtttacggctcccctctatgcactcttatatcctcaaaaagcaaagtttagcacagtctgggctttattctgagattttatctcttcctaacagcaagatggcctctacactgcctgatgatccaatcagcttcgtgttccatttccacaagagtacgtgttctgggagggcaaatgaattttacctgttgatccaaatgtgatggcacgcttatgaagggttgatagtctacgtgttgccactattcgctgccgtcattttcaatgatgcacagctttccagtgtgtggatgcgccgtcatgtcttaaccacttccctgcgtggatctttaggtcggttttgccttttcattgttataaacagtgatgcaaggaagggagtgtttgtggttaaatctttacattcatcatatgttacaatgaactggatccctggtttgtttagcgccaaacatattttaattttgttctcaattagcttttttatatagcaaactacccccaagatgtaatggcttaaaacaacaaatgtattggcttaaaatttagcccacaattctgtgagctggctgggcttgctcttccgatctgggccagctcagctgatttctgctgggctctctcgtgtatctgtggtcagctggtgggttggctgaggcaggatgctctagggcggcctcactcatgtgtctggaaagtagtaggctatttcctggggcaatgggtcgtttgtgtctaggtcacacgccttttatctgtcaggttaccctgccttctttacttggtagtagtggcaggggttccccagacagcaagaaggcaagccgccatgtggaaacacctttcaagcctctgtttgcatcccttttgctgacatttctggccaaagccagtcatgtgccagctcagagtcagtgcgggagggctctaccaaaaggcatggagagaggagcggaataatttgggtccgtttcgtgcaatccaccacagccaatatttttaaattgagatttctgggccctattgaaaaacaatctttggctactctggatccctgtccttgaatcacagtaacaggcaagcctttcctagcatgccatggtccttcccatcccccaccccacagaatgcacatcctttgcccagctccttccacctgctcactacctgctcagccacatacgtttatggcctccagacatacagccatgatgatgcttagcataatctcctagaagtggaatcgccgggcttaaagtattaataacatatttttaaaaactattttgactttttaatactttttaaaaacttttaaaaaatattttagggatggatgtggtggctcacgcctataatcccagcgctttgggaggctgaggcgggcggatcacttgagctccaggagttcgagaccagcctggggaacattgtgaaaccccgtctctactaaaaatataaaaattaaccagatgtgatggccagtgcctgtaatttcagctactcgggaggctgaggcaggagaattgcttgaacccaggagatggaggttgcagcgagccaagatcgcgccacttcactcgagtctcggagacagcaaaactccgtcttaaaaaaaaaattaacttccgtggcccactgtgaaagttgctgttggacacacagacacacacacacacaggcctgaggcagcaggatgaatctgtcttcatccctttctctggggagttctccaggtgtggcagctttggacagagcctcacctcattcagctattcagcaaactctcaagcagaggctactgcacaccagtcactccgctaagcagggaggcgaaaagattactaataaatacacagttcctcttctccaggaactcactgtttgaccaatgagacagacatgaagctctaattacaacacaatgcaatcaggcctgcgcctgagtatcgagtctatgggaatgcagaggagaaatgatccatttgcctggcttcttgggaagtgagaggtatgggaaataataacactgtatctaaggctctgtcacttgggcaagttactccacctctgggtgccagtttccccacatgtaaaatgcaaacaaataacagtacccacctatggtcacagtgaggattccatgagatgaaaggtataacatgcttagaacagtgcctggcaaagatgttttgttaaaccattgagttgaattcttttggctatcagagtttttctttttctttttcttttttgagacggagtcttgctctgtcgccaggctggagtgctgtggcatgatcttggctcactgcaatctccacctccctggttcaagcgattctcctgcctcagcctcccgactacaggtgggtgccaccacgcccagctaatttttgcatttgtagtagagacggggtttcgccatactggccaggatggtctcaatctcttgacctcgtgatccacctgcctcagcctcccaaagtgctgggattacaggcgtgagccactgcgcccggcccagtttttctaatcttcttcaccctcccagggctctgagaagtgtgagggtagaatcacctcctgcagatgtttgtggtatagaaatagaaactgcatagtccctcaatatctttatcaggactctaaagataagtggctatgaactgtggcacacttcagagcatactcagagttggggtggattctgatctaacagttgtctaccattaaatgaataactacagtctttgagcaaattcttgctgattacaaaacactatgcaagttaccagagatacaaagatgaataagccatagtctctgctctcaggatctcagcctgctggggagacagctataaccaccagcaactatggcaagcacagagggagcaattaagttggccacagaggaggtaatacttcaactgagcttttgtaagtcctgcccaagttagcatgttggtctctttgggaggccttaatgtgtatgggcagcagaatcccatttaatttattttacatccagtttgacaaatggctctccttgccatggatatgcaagataaatatgcctccaaaatgtgatctcagagcaatttagaaactaagtggcaaatatcctatacatcaagatgacagtgacattgagaaacatgtggtttgttaatccacagtgggatcaagatcaggcttcaagttttaggtattaggcatattttggggttcttttttatgacatccctatcccttttcctctaaaactcccacatattcaaattagatgttgctggcatacaggggaagtttttaaatgtaataactgcctgtttacttcttggaactataaacaaagcttagaagaacagggatgtctatcttgttggcatttagtgttcttacaggaaaattaaagtctcacaaagacacagttcagtgagccaattaagccttgtctattaaacttatgcaaaatatatggcaataattctgatagctattgttaattcaaagcataggctatgaaatccaggtttgagcacttaaaaagtaaaaaaaaaaaaacccaacatcttggcaatactcataatgtttccatttcattttcatattctatctctaagcagggctgtttttgatgtcaaattacattcttaatggagaatatttggaggaaatataaaacggattggatttgatcaagtagttactagtctttcttctggtgacgtataacctcctacttgtcagcttctagaagatgaatcaattttgtgaggacttggccaatatcaaggtcttcagcacgactcatcagcctgttgctaattcaaggacaacaaatgcctacaaatgctttaagtaagcccagttacagactgctgatgaatttggtgctcctggtgtgtgccctggccaagaatgagggtgtctgtctaggaatatttctttgaatataaatagtaggtagtggtttatctttgtccatttagtgttgctacatgggaatacctgaggctgggtaatttataaagacaaagggtttatttggctcacgattctgctgactaaagactgggcatgtggtggaagccttgggctacttccacttatgacggaagaaggcaaaggggagctccctgttcggagatcacatggcaagagggggagcaagagcttgtagacaagtgatgtatgacagtctccatcttccagggacttctgcctccacatcatctctttacaaccagagcccccagacagaggaggactgagtcttttgtggctagcacattggagatagttgatttaatggacaaattatataaagtgacatttattttttatgctgggaaattacttccaacaatatatttttgtccaaccatctgcttgaatcaagtttctgtcagcctctggaagtaataattattccctgctctgaaactgagcttcatgctggttttctgctgagggagcagaccctttggctgtctgttatctattgtcaagagctcttttgtcactcattattgtcagctgctgatttcccaacagacactttaaggctataaataaaccctcccaacacaaatcccctccttatgaaagtgtgaaagacaaaatacaccagtaaattaggatatgatttttattcaggctgttgccataggaggacattcattagtaagaaatatctcaaagaaaagaatgagcctggcttttatggagacaaagagagtcttatgggagcatgacgaaggacggaggtgggtcttacttcagagtatgcaaagcctgtgtggtccttggcaattagccagttcctacaacccaaaagggcagaagatttcttaacatctctactttttagagtacaagacttagattaagttcaacattgtcagtcctcccttttgttgaaaatgaacatcattgccactgttgggactcagaaaacaataccccaaaatgaaagcctccaaagcagcctcagaagcaaagtctctctctgaccttctgctgcccgctctgtctctcacccctcattctccccggagataagccatagaaactgtaatccctcttccccaagatgggtcatagaaactagaactccttttccccaaagccagccataaaacctagaaatattattctaaccttccaccattcttctgtgtaacacttggccattaagaaactaagaccctcatcccagaggggtcctaccccatacctgggaggaaggaatgctgcatggagaggccaagaaggatctgaacagccaggccttgtaggtttccccacgcagtctatttccattagatcatagccttttttgtccaatcacatttccacatgactgtccctgcttcatcaaacctaagcataaaatcagagagcttctcctgagtctctgggtcttcgttctgaaggctcacctgtcatgtaaaactatgatcaaataggctgttcattgtttgaagcaataaagtgcaaatgaaacctgtctttacatgcacagtggggcatatgcttccataaatgcctgattgtgtgtgcagatgagtgtttaacacacccagttacctgtttgctatatttatatttttagggttaatgtaagtgctttcattttttaaaatgaaattgttttaaattgttttttaaaaagctataatcaaatacatttgttactttttttctggttaacttgtcttttgttatagggtgttggccatgatccttatgatggggaggaagggaatcaccaattttctaccccatcccactgagcaacttagagatgacctaaggcctcgttacctgtgtggagtaactgggaattggaaggtgaggtccaattatatccaagtcttggcatcaaactgtgaaagacaaaatgcactggacaattaaggatatgattttattcatgcccttgcaatagggagaacatttattaatgaagaataactcaaaggaaaggaaggggtcctggtctcccatgaatcctcatgggagccttgaggaaggatgaaggtgggtcttatcacagaatattccagggctgggttgtcctttgtggggatggctgtttcttttgaaacacaaaagggtgggagatttctttgtctctctctttttttttaagagacagggtctcactctgtctccccagctggagtgcagtggtgtaatcacggctcactgcaacctcagcctctcgggctctagtgatctacctcagcctctcaagtagctgagactacagaactacaggcgcaccaccccgaccagctaatttttttttttttttatatagagatggggtctccccgtgttgcccaggctgatctcgagctcctgggctcaagccatcctcctgccttggtctcccatagtactggtattacagacattggccactgtatttggctcatgtagggggtttgttaaccatcactgcttttagggaacaaaagccttggaggaagtttaacagtgtgaaaattcttcaacttttaagaggccaacgcaaatttgaaaaaaaaaaaagtttttataaggtttaggtataagatatcagaattctgacatcttaactgtttgcttgttcaataagaggtacttaagctaactccatatttaatttgagtaaagaaaaacaaatggcctgtctgaccaaagctaaacaacaggaaaggaaacacagctccttttactttcctagagaatcatggaccaattttcaatttggaccaatcatggaacctttttctgtagcttatagaaattcattcaaagtgtactttttgagcacctgccatgtgccaggcatgaatataggtggtagggatatagcagtcaatgtgacagtctgtaatttctccccttgagccccttgctatggagaaagagaatgcagcaaagggcaggaagagccaggcaaaggagtagtactgttgccaaaaggtcagccagagaagacccccacaagaaggtgacaggagtaaaaacccgagggagggagccgtgctgaggcctgaaagaacattttgggcagagggaacagtaaaatgggaaaaccctgagatgggaactgttaaaataattaatcaggaggacatttacatgagtcaccttcagcacctttggttgctacctaagcaaatggaaaaccaactcaatgtaaacagtaaaatgaaaccagcgtaaccaatcagaaactgccagctaacttctaactagagactttaccaatcagaaactgacctctcaccagggactttctgctttaaccaaatattttctttgtcttgcttccatgagcaccttataaaagccccctcctctcctcccctcggagcgccaggctgcttgtggtctggtgctgcccgattcctgaatcatttaaagctcaaataaactcatgacattttaatatgcatacatttatcttttaacagaacttggccaagattttcaaagaacggcgaggagttcagagtctctagagtgccgttgtaaagaggggaagggtagtggctgaggcctgagagctgagggagcagaggctgcagggtggtacagacaactgtgatgactttggatgttactcaggttgaggcaggaaagtactgacatgatggctttgagcagaggtgggacaccatctaacatattttcaaaggattaccctagcttgtgtgataagaggattgaagcaggcagaccagtgaggagctgttgcactgctcttgagaagagaggggctccaatcaagatggccatagtgaagtgtggtggaggatgcttaggtctccttcaggaattaaacatttattcctccagcagccaggaagctccagctaatggcctttggctgtcagccctcttcaagtattgcctctgctaaagacagttgtcttgcccagtgacacttcccctgcctggaggcttgttagtgagggctacaaaggcctggccctgcacctcaactcaggacaactcctaagggtcaccccagttcagagctcctcaaggagtccgctcaggccttccttgtgactacgtcacagcccagcttcttcctttccacaggcattgattccaagagtaccccctaataaactccccacccactcagctccatcccagactcagcctccaggggaacatagcttgtgcattgaggtggtgagcagtggtcaggttctgaatatattttatttcattttctttcttttttgaagacagggtgatatggtttggctgtgtcccgacccaaatctcaccttgaattgtaataatccccaggtgtcgagggcaaggccaggtagagatccctgaatcatggggtcggtttcccccatacttttctcgtggtagtgagtaagtttcatgagatctgatggttgcattaatgggagttctcctgcacaagctctcttacctgccaccatgtaagagaacctttgtttctcctttgccttccaccatgcctttgtgaggcctcctcagccatgtggaactgtgagtacattaaacctctttccttctccacagagaatctaagtggtcttacaaaggaacaaagctagccatcagcacgtccaccaggaaatgtttccagcagtatttttttctacaaggcccatggtgcaataatagactcccatgagaagttgaaaataggcaaactgcttacaaactacctttatcatacaccccgaggataattccaaggcaacattgaagtaatcaaagcgacatgacaccaccttgtatagatacagtttcacagtagaaagaaagttcgctgtagggaataggagttaaggagatgaatcttgagctggggcttgacgggagtgtggagtaagtggaaagcctgggaaaggtgtgctagaggaaggggaaggtgagagagggcccagaagtgaagatggttaggatgcctaggaggagcctttgttgtgagtctgcctctcatgaaaattacatctgttaagtaaggtggggtgagtcagctaatttttaaaaccaggccaagagtttgggtttcaccctttagactaccaagaaaacaaaagaaatctcaacacttttaaagtgccagtgtgaactgtgaatctccaaatcagaaatgtgtggtatttcccaaacttatttgacattgaaaacctctcttccatgacaccacctattaacatctttggaaagatttatcccacagacacattgaggtagagaacactcaaccttggggtgtaatgggaaaactagtgggtcaaaggagccagtaataaccaagatttttaaaaaggtatgaacagtatcttgagtggtatgcaaaaaacattgatttattctcctcctccaacaattcatgtttactgttagcagcatattatggggcacatggaaagagacccgtggttttctggaaccttcttttccttctttaatgattaataaatctgtcacattttttattatatgacttgtatccttgcaaaatatcccctggcttgatatcatgctgcatttctgttcaagcagtggttgtattgcctgttcctcaagaggcagtgggcattgtctctggtcgttgtcagatgccaggtggcacctgtaagacaagcaggaaggaactggtcttgccctataacagcagccccgagccaggaaagttctgtctatagccccaggcctctgcggtctgtccccacgcttgccaggacttctcatccctttgctatcttctcatttcggttctcatttgcttactgtggtgcctccccaactaagctgcttggtaattgaacttgagttttatcttcccttcattctacttcaaaaatacccgaacgtagcttgtttgtttttccagtggggcatctgacaagtctttagcttctgtttagcaatagttcccagtcagaggtgatactaaatccccccaggcctctactatgtggcctttgaaaatgtgtggaggcatttgtgtgtgtgtgtgtgtgtgtgtgtgtgtgtgtgtgtgtgtgtgtgtgaagctgtcatcatacattggcgggggttagggttagcattactgccatgtgatgggcaggggctggggataatcctacagaatgaagagttgccccacccaaaataccagtaacacccccaataagcactgctgtatgcttcacatgagtaccactttgctaattttcaatatctaaagcaccacctatgccattattagtttaatatatttctttgaattaattcacttaaattttttttatttattccaaacagcagtatactagaaatgatgggtcaatgttatttatatattttacagtacccataaaaataaatgcctaacacctaatacaaactattcttaattaatgatacacacatgaagtcgggaaacactgcagctatggccacatgcccagttagattttatttatgtatttatttactgttatatagagacaaggtgttgctctgttccccaggcaggcacagtcatagcttactatagcctcgaagtcccaggctcaagcaatcctcccacttcacctcccaagtgtcaaggattacaggtgtgtgtcaccacgcctggctcatttttatattttttgtagagatgagatttcactatactgcttaggctgatcttgaactcctggccttaagggatcctccatcctcagcctcctgaagtgctgggattacagacatgagccaccgtgcccaagctcctgttggattttgatgggaatattagccccacacacattttctcttctgaaccaggaatgtctgtgcaagtacaccacatagactccttagcatgagccatataagggcaaaggtcacatgtttaatgtcccataaacatcatttattttgtttaaagtagtctatcccaatgacaatgacagcattcttgacctgagtcaattctctttgctggatccaaagtcaaggataaaagtgagggtcacttggcatttgcctccttgaaatgtagctctctgagggcccacctgtgtcttgtgtcctcttctttcctaatgaagtgtctggcacacgaagtcatgattaacgaaggtctcagtgaatgaaggaaacacaaaaacgtatgtgtacccctcagtacggggaaagtgatggagaactgtaaatgctactgtcattgagtcaaaaaatcttacacatgtttcttatgcaagttatgtaacttctctgtgcttcactctccttacctctgaaagacagataatcatagaaccaacctcataacaccgttataaggaggcaatgagagagtatttgttgagtgcttagaacagtgtcaggcacggaataaatatagaaatatttgatgatgaataaacaaatgaatgaggggtgcctggcttttactcaggtttgcaatgtttgctgaaagagtgaatcaacaaatcctagaccagaacgttccaacactcacatccttggtgctcagctgttcccaggagtagtagtagatgctaaagtaaaacatcccaagctccggtgaggaggtcttgctatgggcagcacagaaaagcttttcataacagatagcctagggtgatgccccatgtatcaccttccccactcccccaacccctgcctagttacaggctgcacaggaactgcatactggtacagtcctcccttggtatccatggcagacttgttccaagacctctgcagaaagcaatacctatggatgctcaagtccctggtataaaatgatgtagtattggcatataacctaccacatcctcttgtatactttatttatttattttgagacaggatctcactctgatgcccaagctagagtatagtggagtgatctgggggtcactgtagcctcaacctcctcggctcaggggatccttctgcctcagcctccctagtagctaggactacaggcacatgccaccatgcctggctgatttttaaaaattttttgtagagatgactatgttgcccaggctagtcttgaactcaagcaatcctcccatctgggcctctgaaagtgctggaattatgtgagttaccatgccaggctatcctcctgtatactttaaatcttctctaggttacttacagtacctaatacaatgtttgctatgtaaacagttgttatactgtcttgttttttctttgtattattgttattgttgtattgttatttttttcagtatatttttgattcacagttggttgaatctgggcatgtggaacccacagatgtttgagagcttatatgtctggaaaagactttattttatttgatagcttggctgggtataaaattctataaaattcatttttctgcagaattacttctcgtttctagcattattgagaagattaatggtcattctgattttttattagagtctaaccaatttttccctctctagaagctttagaattttttctttgattccaatgttcttaaatttcacaatgatatgttttgactaatatgttttattcattttgctggacacttgataggaacttttatctcacaatgactttcagtttgaaattttcttaaattattttttgatgatttcatttaccctgttttctttttatctctttctatgactcatagtgtttggatattggacttcctggcttgatccttaaatttccttaccctttctctcttattttttgtcattttgttgtcttttgaaaggtttaatcaaatttcacttccaaccttcttactggatttttaatttataacataatgtttttaattgctaagactcttttgttgtatgaatgtgccatttgaaaatagcatcctattgcttcatgtttacaatatattctcttaactctctgatagtttttgtcttcttatctaatttctgttttctctaagttactttaatctctttgtttttagtctctgcctttcatgttagaggctttctttaaaaggtgatcattggctgttcatttatatttaaaattggggccctaaaaagctgaatgagactctgtattgtgggtggggcttcaagaccattagctcacttgtaggattatcaggctgagctgtttgttggataatcctaatatcagcatctttagatcttttcttttggcttgtcagatgttttcagagaagaatcttctaagatcctgcacagttttctgggaacctagtgatggaagagggccatgagctgtggcagagggcttcaacatttagtatgtagtcctcatgctttcaaaatgattgctgccttcaactgtgccatgtatcccacacttcagagaccttctgtttttgctgtctctaaaccacaaatttctgctgagggaaagaggggttaattttctgatcacacaaagtaagcattagaatttgggctggggagcagggaggatttgtatttgtgtctgtctgactcctagacttttgtcttcccctttactcccaaatcataaacccctgctacttctaattcttgaggctttgtggttctattttagaaaatgggctactacttagcttgctcacttaggacatagctgtcctagacctgctaggtcagttgtctttcctctttctgttttctaactcacaacattttacggctttcattttccctccaattctcctttcctccttcggtttccttcctgtatgttagttagtggggatccataaaaagtacaggaaaacatgtgtgtttaatatctgctatcttcaagttgtatttgacatatatatatatatattttttaaacttggaagtccaagatcaatatatatattttactgataaaatgttccaatatgtaatttgctctcttaatgactactttttttaagtaaggaagttaaggaagctacagcagtaattcttgaggcatattagaatatttcttactgacaaaatacttttgaaccaattattacagggatatggttcaactgaaattgtagtgacctaatttacaaagataaaactgtctattttagagattgcagtaaatttcaaaagtaaatgagggaatgtgaaaggaatgaggtaaattgcgaatacccatggtagaagaacactaggaaataaagccctggaccaggttgaactgggaatgatgcttcatcagtatagtcagaagcaacatgcctggacatagaatccaaattgtttttgagtggggggcccagagacaaaattgattttcctattctaagactgagccacaatgttaggaaattagaaagagaaatttaaaatagctcagaatcaagattaagaacagcaaaagaggacttgacaatttcacttttataaaatgctatgagcatgtttgtgtttatgggaaagatttaaagttgaaaacatccagtattgttaaaattatgaagaaataggcaatttaatttactgttggggagtatagacttattaagtagtaattggtaattatttattaaaattataaatgtggatttagtttgactcaacatttcaactcctacaagtaatcctataggaaagactgaaaagtaatgtacaaggatgttcattgcatcattgcttgtaataacgaaaactgaacacaaccaaaatgttcattatagaggattatttcaattcatggtgctacagactcaaatataactagtcttttgtggtccactcttataaggagattcattcaaaagaaactaatttagtatctctcaaagaacattgaaagagacctaattcataacctataactccatttataatttatccttgttttacagccttattattgaatacttggaacaccatatatcaggcaaaagacataaagtcagttaaaatatatgtatacaatgatatctaaaatatgttgttcaactttaccaaaatgttataaaatagaatatatggtataatttcattaatgtttaaaaaatataaaggcttccagttttgagtaatggcagagtagtttgtatcagactaaaccttccactgattatgaactcattcttctctctctccctctctctctcttgcacacacacacacacacacacacacacaagaaggaccaaaaataggcacaaactggaggagatattatacatattgaactggtttttcacctgcagacatccaccacctgcagaaaaagtagactttttcaactaaagaattagaggcttgagtacagggctgccagagcaactggaaattgaagtgggttgttgggggatcccaggaggttaggagtaatagaacagggaggtcccagaattatgtacaaaatcttctcaaaaccttggctgactctttaaccacaaatgtacagggcaagactccaaagagcatagcagaaaacatcagctggaaggctgagcagggatttcagcagctgcctagtactggagagatacagtttgaagttaaaatctcaccaaattagtggggcttgataaacatgtcttgaattccatcagtatgccagaagcatcatgccctagatataaggatcatatcccaaaactcagagttgtatcctaggagtaagagcaaaaataaaatataactagcttaacaaagcctagaaccaagcctacacaggattaaggttatccacaagaaatttacctgcctactagaacaaaaccaaatactcatctgatgaaaatgacagaatttagagtttctacattgtccagcatacaataaaaattaccagacatgcaaagaagcagaaatatatgccaataataaaaagagagaaactccagaaaataaaaggatacccacaaacaaagcaggtattggaattagcatataaggactttaaaattactattgtaaatatgttacagaatttacaggaaacaataggtgtaatttgtggagacatgaggatttcaggaaagagatgaaaatgctgaaaaagaaccaaatggaaatcagaactaaaaaaatgcaatctcagaactgaaaaatacaatacctgaaatgaaaaatacaatacctgaaaaaatgatggatgggatcaacatcagtttgaaaacaacagaaggaaagatcagagaacttgaagaaaagccaacaaaaatcaccaactaaaggagaagaatatttgaaaagaaattaacagagccttccttaccaatagggaaataataagcaatctaacatctgtgttattcaggagaaaagagaattaatgaggcaaaaaatatttaaggagacttggctgaaaattttccaaatttggagaatattgtcagtttatgaatctaagaagcccagtatacctcaaacagaaaaagatagaaattcatatctaggcacataattgacaaatggctgaaaaccaaggataaagaaaaaaaaatctttaaaacagcccaataaaagacacatttaatacgtggaaataaatataagagtcactgaaaatgattcatcagaaataaggaatgatttagaggtgggagcaggacttcccaggccctctcccaagcaaaacagaaatttaactggtgaaaagtattttttaaaaaatcattccaagtctctggaaattgtcctaaagacatacgacataacaacacatggagaagtatttattcaagaaaatctgctaaatattggtaagaacactgacagtctgtggcacttgaaccatgacttgctcattccatgtcctcacctctcctcaggtctgtgttatggaagctctaccctgagaatgtgcaactaagaaaatgaggacgggaccttcctctcccttaagttcccagtctggggctacagttttaccctcagaagggcaggctactgacatttttttgtccatcccagccccgtgttgcaggagctctattcctggtagacatggccaagaggaacaggtcttgcttccaccaccatgcaccgccaccagtagggtggaagctctgccccaactgcagcagccaagagtactggggctccaaacacctacaccccagccaactcatagggtggaggtttcaggctgagatgggcaagccaagaagaccagggactgctactcctcctcaaagcccgttatagagtggggatgtcaccccgggaaaagcaggtcctaaccccaaactccttttgagtggcatgggggttcttcccagagagaaaggcaggccataggatcaaccccacatatctgcctcagggggctgattatttggaagagaaaatggagaacaccatgtctaaagctattgtgaaatggagatgatagtggacaacaattaaaaggagtctggtaactgtgacataagcaaaatgggagcacagaagttttcaaacagatgaaaagacaagacccaactacatgccatatacaacagatacactataaatgtaaaagcaaacaagtcagaaattcagaatttttaatgggatgtatctgtatacctctctttgagtattcttgcttggcacatagtgggcccagaattattgggttttaaattttaacctaacgacttaatatttatttatttacttaggctagtcaaatgatatagtgggtgtttctctactaatgactccctgtcatcttatccatgctctcctataatttttaaaataaatgtgaatctttgtttatcttgcctcacattaaatggaaacatttttttaaaaattttgtgggtacatagtaggtataggtatataggtaggtaatggggtattcatcccctcaagcctttatcttttgagttacaaacaatctgattattctttaagttatttaaaaatatacaattaagttattattgactatagtcaccctgttttgctatcaaatagtaggtcttattcattctttctaactgttatttttgtgtccattaactatccttcacctctcccgcagctccccacgaccttcccagcctctggttaccatccttctactctctatgtccaggagtttaattgttttgatttttagaacccacaaataagtgagaacatgcaatgtttgtcttcctgtgtctggcttatttcacttcataatgatatctggttccatccatgttgcaaatgattggatttgcattacttttcattgctgaatagtactccattatgtatatgtaccacattttctttatccattcatctgttgatggacacttaagttgcttagaaatcttagctattgtagacagtgctgcaacaaacataggagtgcagatatctctttgatgtatggattttctttcttttgggtatatacctagcagtgggattgatggatcatatggtagctcaatttttagcttttgaggaacctccaaactattctccatagtggttgtactaattcacatccccaccaacagtgtatgagtgttcccttttctctacatactggccaacatctgttattgcttgtcttttggatataagccattttaactgggatgagatgatatctcattgtagtttaaatttgtatttctctgatgatcaataatgttgagcaccttttcatatgcctgtttgccatttgtacgttttctgttgagaaatgtctattcaagtcttttgcccattttttgaatgaattattagatttttcctatagagttggaatccttatatattcttattaatcccttgtcagatgggtagtttgcaaatattttctcccattctctgggttgtctcttcacgttgttagctgtctcatttgctgtgcagaagctctttaacttgatgtggtatcatttgtacctgtttactttggttgcctttgcttgtggggtattgctcaataaatttttgcccaggccaatgttctggagattttcgccaatgttttcttgtagtagaaaacatagttcaaggtcttagatttaagtcttgaatccatttttatttgatttttgtatctggtgagagataggggtctagtttcactcttcttcatatggatatccagttttcctaacaccatttgttgaagagactatcttttccccagtgtatattcttggcacctttgtcaaaaagtgttttcatcctaggtgtgtgtatttgtttctgagttctctattctgttccattggtctatgtgtctgtttttgtgctggtaccatactgttttggttactatagctttatagtataatttgaagtcagatgatgtgattcctccagttttgttctttttgcttaggatatctttgactattctggctctgtttgtagttctatataaattttaggattttttttctatttctgtgaagaatatcattggtattttgatagagtttgcatcgaatctgtagattgctttgggtagtatgaatattttaacaatattgatttttccaatctatgaacatagaatatttttctctttttttggtgtcctcttcaatttctttcatcagtgttttatagttttcattataaacatcttttgcttctttggctaagttaatttctgggtgtttaattttatgtgtggatactgtaaatgggattacttttttcatttcttcttcagattgctaactgttggcatatagaaacactactgtttttgtatgttgattttgtatcctgtaactttactgaatttgtttatcagttctaatagtttctttgtggagtctttaggtttttccaaatacaagatcctgttatctgcaaacaaggataatctgacttcttcctttccagtttggatgacctttatatcttcctcttgtcttattgctgtagctaggactcccagtactatgtttaataacagtggtgaaagtgggcacatccttgtcctgttctagagcttacaggaaaggctttaagtttttccacattcagtattatactatctgtgggtgtttcatatctgacttttattatattgaagtatatttcttctttccccagttttttgagggtttttaatcatgaagagatgttcaattttattatatgctttttcagcatcaattgaaatgatcatatagtttttacctttcattctgtggatatgatatatcacattgattaatttgtatatgttgaaccatccttgcatcccagggataaatcccatttgatcgtgatgaatgatctttctaatgtattgttgaattcgatttgttcgtgttttgttgaggatttttgcataaatatccatcagagatattggcctgtagttttttgtttttcgttgtgtgtgtgtttgtgtgtgcgtgtgtgtctgtgtgtgtgtctttggttttggtatcaaggtaatactggccttgtagaatgagtttggaagtagtccctcctcctctatttttcagaatagtttgagtaggattagtattagttcttctttaaatgtttggtagaattcagcagtgaagccattaggtcctgggcttttctttactgggagacttgttattatggattctatttcattacttgttattggtctgttaaagttttgggtttcttcctgattgaattttggtaggttgtatttttctaggaatttgtccatttcttatagattttccaatttattggcatttggtgcttatagtagccactaatggtcctttgaaattctgttgtatcagttgtcatgtctcctttttcaattctgattttatttgcatcttttctctttttttcttagtctggctaaagttttgtcaattttgtttaacttttttaaacatcaactttttgtttcattgatttttgtatttttttatttcagtttcatttatttctgttctgatctttattatttcttttcttctaccaattttgggtttggtttgctcttgcttttctagttctttaagatgcgttgttagattgcttatttgaagttttccctcttttttgatgtaagcacttatagctgtaagtttccctcttagtactaattttgctgcatcccataggttttggtaccatttctttcaagaaatttttttaacttcctttttaatttcttcattgacccactggtaattcagaagcatattgtttaatttctatgtatttgtaaagtttccaaaattcctcttgttattgatttctagttttattccattgtgatgagagaagatgcttgtcattatttcaatttttttgaatgttgtaagacttgttttgtgacctaacatatggcctatccttcagaatgatcaatgtgctgaggaaaaaaaacgtgtattctgtagccattggatgaaacgttctgtaaatatttactagatccatttgatctacagtgcagattaagtctgatatttctttgttgattttctgtctggaagatctgtccaatgctgaaagtggagtgttgaagtctccagctgttattgtattatgatctatctctcccttcagctctaatatttgttttatatatctggatgcttcagtgttgagtccatatatatttaaaattgttatatcctcttgctgaattgacccctttaacattatttagtgactttctttgtttcttcttataattttgggcttgaaagctattttgtctgatggcactatagcaactcctgctgatttttgttttttttccatccttttattttcagtctatgtgtgtctttagaggtgaagtgtgtttcttgtaggcaacatattaatgggtcttgttttttcatccattcatccagtctgtgtcttttgattggggagtttagtctatttacattcaatgttattattgataaataaagacttacttcttccactttgttatttgttttctggttgttttgtggtcttctctttcgtctttctttccttcctgtcttcctttagtgaaggtgattttctctggaggtaagatttggtttcttgctttttattttttgtgtctccattatatgtttttttggtttgaggttaccacaaagcttgcagatactctcttatgtcccattattttaacctgataccaacactgtttgcataaacaaacaaacaatcaaagagaacactaatacaagctctacaccttaactttgtccccttgctttttaactttttgttgttctatttatatcttattgtactgatgatgtcttgaaatgctgttgtcattattattttctattggttcatcatttagtctttctactcaggataagagtagtttacatatcacaattacagtgttaaaatagtctgtgtttttctgcgtacttaccattaccagtgagttttgtactttcaggtgattacttagtaatgttccttcctttctgattgatgtattccctttagcatttcttataggacaggtctggtgttgatgaaacccctcagcttttatttgtctgggaatgtctttatttctctttcatatttgaaggatatttttgccaaatatactattctagggtaaaagtgtattttcttctttcagcactttaaatatgtcatgtcattctctcctggtctatttctcttttcatttccactgtaaagtcttctgccaggcatagtggagctccattgtatgttatttgtttcttttctcttgctgcttttaggatccattctttattcttgacctttgtgagtttgattattaaatggcctgaggtagtcttctttaggttaaatatgcttggtgttctataaccttcttgtacttgaatgttgatacctttctctaggtttgggaagttctctgatattattcatttgaatacactttctacccctatctctttctctacctcctatttaaggccaataactcttagatttgtccttttgaagttatgttttagatcctataggtgtgcttcattgttattcatttttcttttgtctcttctgactgtattttcaaatagcctgtcttcagcctcaccaattctttcttctgcttgatccattctgctattaaaggactctgatgcattctttagtataccaattgcatttttcagcttcagaatttttgcttgattcttcttaattatttcaatctcattgttaaatttatctaatagaattctgaattccttccctgtgttatcttgaatttctttgagtatcctcaacacagctattttgaattttctgcctgaaaggtcacatatctccatttttccaggattggtccctgatgccttatttatttcatttggtgaggtcatgtttccctgggtggtgttgatagatgttctttagtgtctggccattgaagagtgaggtatttattgtagtcctcactgtctgggcttatttgtagctgtccttcttgggaaggcttttcagatatttgaaagaacctgggtgttgtgatctaagccatatctgcttcactgggcaccccaagcccagtaacactgtggttcttgtagactcatagaagtactgccttgatggccatgggacaagatctgggagaagtatctggagaaccaggcagagactcttgttctcttcccgtacttaaccaaacaaacagtctctccttgttcagagccacctaaagctggggtgtagcgacacaagaacctctgtggctaccaccactatgactgctgtggatcacacctgaagccagcacagcactggatttcaccaaaggcctgatgtaaccactactgcctatgtaaccactacgtggctattgcccatgttcactcaaagccctagggctcttcgatcacttgatgccaaaaccagccaggcctgtgaccttcccttcagggtggcaaagtcccccagacaccaggtgggtccagaggtgctgtacaggagtcagggaatacagtcaaaaaccttagaagtctatctggtattctgttgtactgcagctgagctggcactcaaaccacaaggtgcagatcagtgcacaagatgcagtccttcctcctcttcctttccccttccaaaggcagaggaggctcactctgtagccactgccactccaggccataaggagtactgccagactaccacctatgttttcttaaggctcaagggctcttaagtcagcttatggtgaatgctgcctggcctgggattcactctttagggccatgtgctcccctctggcccaggacaggtccagaaatgccatccaagagtcaagtcctggagttgagggctccaagagcctgcttggtgctctatccccctgtggctgtgctagtacctaagttgcaagacagagttccctttgcttttccctctgcttttctcaagcagaaggagttttgtcccacagccaccacaactggtaatgtcctgagtctcacctgaagccagccagtctcagaggcccacccaaggcccccaacatattacccgagtgttgctactggttattcagggcccaagggctcttcagttagtaggtgatgaatgctgccaggactgggtcctttccttcaagtaaggaaagtacaggagtaagtatgggaagagaacaagagtctctgcctggtaatccagataattctcccagattttgtccaagaccattaaggcaatacctctacgagtctgcaagaaccacagtgttactggggagtgggtccctcctggcccagggtatgtctagaaatgtcatctgggagcaaggacctggaatgaaggcctcaggaccctgattagtgtcctttcctgctgtggctgagctggtatccaagatgcaagacacagtactcctcactcttcccttttctctcctgaatcagaaggaaggggtatcttttggagccatgagctgtgtagcctggggtagggtaggggtgatgtcagcactcccttggctgccccaactggtgtctcagtaggtcacatgccccacccccagtccactctctttaggccttgttcagcactaggattcattcagtcttccagtccttatggcctagactgccttttaagtttatttagaaacacagcgctatagcccatggtggtgaggtttgtgggaactcaagttctgaccactgggattggcgattccctctggctagggctggtttaaatgcctcctccatgggtgggcgttagctgagtttggtcctgtttccctttctgctctaacctgacagcacactggggaagggtggcatcggcaattcaagactgttttttctatctcttcagtggctctttcatcggtatgaagataaaaccaggtactatgagggctcacctgatttttggttctgatgaaagtgttttttttctgcgtagatcgttgttaaattggtgtccttgctggggggaagataggtggcactttctattctgccatcttgctctgcctccaaatctcccacaatttttattaagcagatttttttcttctgaatcttctatattctttatcttttttcctcatgatttttttctgtagctttttgcactatgttcagggagaataccttgatttggtcttccaaatcactgttgtcttttcgattgtatctgttctgtacttcatttctggtattgagtttctataatttgttaatcatatttttagtttttaaagatttctttctttttctctgattgctactttttctacagctctttttttatggatctaataaggattttatctcaggaagcttaataaaattacttgaatgttctctttggctgcctgcatttgctctctcctcagaatttaattctctactcattcagctttcaggctataaggttggttttaaggtctggtgattctcagttattccttttcgaatataaattgatctgcattggtaactggtctcctttcctcaccaattgtttaggttcccttccaacatctcttgccacgtctgccccctaaatgtggtgactaactgtaacacatgtgttttactccaaggttcatgggcaggtgggggaggccagcaggttgccctcaaataaacaagtagggaaagttaccttttagagcacctcagggcatttcacacctgtcccaggttgtgtctttccttaattaacagttcaataataactggagcaatgctctacttttctctctggccctagttcttattctaagggtctcccgcgactgatcctttactcagagagcctgggagcaaacacaataactagctgctctatgtgccactgggagaggtggggcactggcctggcacttcgactatcttgtcaagcgtcctacaatacacttctaccctgtcctgttgaccttgggttgatttttctcttgagaaaattagcatattcagatttgacagtaatatcaaacacctactctatgccaggagctatgcaaggcagaaataatacagtaatgaatacaacagatggtgacttgtcccagtgaagtttacaggctggagaattatttatccagtaggcccctccttcactgtggtggactgtgtgtttctcagtgctttggtattcctgtcagcctgctaccatccagaaattcttcagctcccctcaactggcattttctaggtaatgtctaggacttagtcttatcttacggatcacatttcactgggatctggaaaggagaaagcatgttggcttagtgcaccaccttgaaccaacccctttttttttcttcaagtggaagaggaagagctagtggagttcagatgttctttatgagtctataaacaaaagaagtcatttccacccccaaaggaaggctttgaatacaattattcctacattggttctggctctgtaactggagtttctatggagattggcgggagaaatcagagtcctagtcatattctaacatcaaggagcaagtctaggaatgggactgcgcagctcaccgtcttgctttttcattttgcttcttctaacatttttcatgatcccctaatccgtgtgacttttaaaaatatggtttggaagtgccacttttgaagcatgtgaatagaagagcatctcatcccctcactctccccggtacatcccaacccctaccatgcttcgaaaggactgtctctacaaattttgcttcactccctgatgtctggagatcagtcagataggtggatttcttcaggtcttctttggaacccaaaagatctctttctgcctttcggttgctcccaagctttggcagaaaactctattttcagaatcggtactttttctagttgacctttgttgataagttccttcctcactctggtttcagtagatttgtttttgttagaaccaaactgagtgaaaggctttccttctcagaaataagaactaacacctcactaggcagcttgtttagccacccttaggcaaacaccaaattgagcatttagcaattccttttttgaagctggagggaagggtccaagaaagccaactcccagttccaagaaagtgcagacactatttgtgtacttttcttcagatggttgtcatttttaaccaagtagctacactgtcaacctctgatatctctgtgacaacatctatgtgacaaagtcaatcaaaccacccttggcctacctaccccaaagcaacaaagatcttatcttctgatgaggattaagaaagactgagtcctctcagaaaggaagaagttaaaaaaggttcaggcagcactttgtttgtttgtttgtttgtttggcagcagcagtattttgtggctggtttcttttaccacacaaaaaaagactgtggctaatagatatgtcacagctttttagaaacacgtcaattttttttgtgttctgcagctctcaaaaaaaaagtgtggggggggggtggggatcaatcctttgcagcttccaagaaaatggtttttcttttcttctttttgtttgtcacacatctaaatcctagaatcatttagaaagagggagggatgaacgttttcaaaagaattggctccctcactccacatatgcagttacaagcatgtgcagaagagaaggtactgttggtattactgggtcacaatttggacttttgatttaagtaaagaagacttgtactatatagtcaacatttattatataaagttgcccctgagactaatcttcagaaactagataaatagaactgtgtgctctgataaagtgtctcccttggagattatctcacgaggatatgaaaacattataccctacaccaaagatgtgagtgattgaaatatataggctgggcggggtggcttaccacctgtaatcccagcactttgggaggccgaggcaggcggatcactagaggtcaggagtttgagactaacctgaccagcctggtgaaaccccatctctactaaaaatacaaaaattatctgggcttggtggcatgtgcctgtcccagctacttgggaggctgaggcaggagaatcgcttgaacccatgaggcagaggttgcagtgagctgaaatctcgccactgcactgcagcctgggtgacagagtaagactctgtttcaaaaaaaattaaaaaaggccaggcacggtggctcatgcctgtaatcccagcactttgggaggccgaggtgggtggatcacaaggtcaggagttcgagaccagcctggtcaacatggtgaaaccctgtctctactaaaaatacaaaaaattagctgggcgtggtggcaggcgcctgtgatcccagctactcaggaggccgaggcaggagaatcgcttgaacccgggaaacggaggttgcagtgagctgagtctgtgccactgtactccagccagggcgacagagcgagactctgtctcaaaaaaaaaaaaaaaaaaacggaaaagaaaaatatatacatattatacacacatacacacactatccccccacccccgtgtgtgtgtgtcttaaacactcatacatagctaaatttgtatataaaagatttgtatggagggccttgtttttgagatacatcatgaatataatgtctatttatacctctttcttcttggctgggtaactctcacttttcttcttaatcacccttaaaataaatgtggcctctttctgatttaacgtttttgaacttttcaatacctatacataaatcagtggatcgacttctgaagacagcgttgtcttcaagggaaggagaggaaatgcacacaaagagggaagcaggtttcctggagcctttggctcaatgttaggtccagcttgagattccagagttaggagccactaaagatggaactggcctttgtggtttcctttccattctcttcctttcctttccatttcctttccattctgtgattcttaagggtaccctcagtctttggaattaacatctgactgtctcaggggattgcgtaattgagtaaaaacagacccaaagtggcaacacgaagagacttggaattaatatatctttggggccaaaatattcagcataattaagcataatttgattaatgtgggatataatttaattaggcatatggacaaaggagggagaaaatgttctccactgtgaagacgagatcactctatcatacatgctggaactaaaattagagggcaggtttgaagataatacaaaaacccatatttaagtccaagaggtttcttagacttctcttttatttccacatgtggacttattcagcaacctgtagtgtctataaaatttaatgtaaactgctacatttggctttctaccaaaagaaattcaaaccctacacttttgacatttaaaatatgaagtattactataagctaaatataaaactaaatctccttctttcttttactgaataattatttactgagatagtaatatgagtcaggtaccacataagacattaagaatttaaagacaagtaagaaatagtccatctcagacctcaaggactgagaaaggctgagcatgttgggtcctataattactcctgtaatcccagcactttagaaggccaaggtgggaggatcacttgaggccaggggtttgacattagcctgggcaatatagcaagatcccatctctaaaacaaaaacaaaacaaaaaaaacaccacattagactggcatggtggcacatgcctgtagtcctagctacttggaaggctgaggctggaggatctgttaagcccagaagtcctaggctgcagtgagctaggatcctaccacagtacttcagcctgggtgacagggtgagaccttgtctctaaaacaataaaataaaataaaaaggagcaagggaatgtcaagcaatgattcatataaagacaatgaagggtacgttctgagaatggaatcccagaggcctctccaggaggcttctcaggatgtggcaagagggtgatccaagagaaagagcagccaagatggaggctgcagagtcccagcctcagaagtgacacaccagcacttctgccatagttttttgatcacacagatcaaccctggtacgggtgagaggggactaaaaaagggtatgaataccaggagcagaggctcactggggactgtctggggaggctggctaccacagttctccagagacaggcagaggacataagtcaaataacaaagtactgcattttattaattgagccaccatccaataacctccattacaagttttaactaaaaatgaatagaagctgtaaggcctaagcagaatctcctacttcttcctgaatctaaaccttgggatcttagtaccttctagaaggatgcagagaggaaagataacaaaattgatagagacaggagacagccagaggtccctggcgaaaccctgccttcaagcctaaaacagcctgaaggctgaaaaaccgtactgctggtcccagatgaagcctactatttcccgactgattctttctgaataacgcccacctgcacacagggaggacggggtggggcctcgggaagttcacggaatttgcagcgaggaggaacctggcctctcctgttcctgtgtggtgagctgggattcaatctgtgaggtgggaatcctgctagcaggattttctctcactttgcagataattattttccctttttcctttttgcccaataaattcctctcctcacccttctatgtgcccgtgagcctaatctttcccagtcgagtgacaagaacctggttttagctgaactaaggagaaaattctgcaacaaaatgacagagaaaataaaatgacttatctccttagtcacttgtatgaggaggtggagaatcagagagggggctgagtgcacttgtccacccgaatgcatagagtgggagagaaggagaaccattcctaaggagggcatctctgtctactaactacaagttgctatctctggtcccacactctgaccaatcagattagcaactcctcttcccttgggttgggggcaggggtgctaggaagaggtgggaatggcctgggagaaggactgacaagtcctttttcctgtacagaaggtattgtcttccctgtttttcgtataaggaaactgagatgtggaaaggttaactgaagtttggtgaggcctgtttccaagaaaccatgactgaaaatcccaacttttaaattcagccatagtggtcacatcaggtcaaagacaccgtaattgctgctgaacttgtggtgaactccagatttatcttttaggcatttcttctatgtcacaggtatttgggctatgcattaaaccaaagatccacttaaagaaatacaaacacaggagggaacttggaaacattttttgcaatctgttctttgcagagataaagaaactgacatccctagggaatgaagcctaggtcctcgtgcccccgccaccccccagtctggtgctttttcctcagtggcactgtggaggggttgttgagtatgtgttccctgtgaggctgattggaaccttcctcttcctcaactgagtgagaggcaggtgagtgtcattgaaagaacagttcttggagctggaagcccccagtgaagtcccagctccattctgcataataagcttgtgtgatctgggtatattctcctcagtttcttcttttgaaaaatgggtataatgaaatttgccaccctctcgagatggttgtaaggatgaaagaagatcctaactatgaaagatctctgtaggggccaggcacagtggctcacacctgtaatcccagcactttgggaggccgaggcaggtggatcacttgaggtcaggagtttgagaccagcctggccaacatggcaaaaccctgtctctactaaaaatacaaaagttagccagggatgatggcacgcacctgtaatcccagctacttgggaggctgaggtaggagaatcgcttgaatctaggaggcagaggttgtagtgagccgagatcatgccattacactccagcctgggtgacagagtgagactctgcctcacataaaataaaataaggatctctgtaggatcccaggtgctgggcaaaggtaaggaatcagtctttatatctataagatatacaactgccaagctaagatggacatgcctctagctgctgatgcttttttttttttttttttttgagacagaatcttgctctgtcacccaggctggagcgcagtcacatagtcttggctcactgcaacctccacctcctgggctcgatcctcccacctcagtctcccaaatagctaggactacaggtgcatgccacaaaacctggctaatttttatattttttgtagaaatggggttttgccatgttgcccaggctggtctcaaactcttgagctcaagcgatctgtccgccttggcctgctaaagtgctgggattacgggtgtgagccactgcgcccagcctgcctcttgcttcttacatttcactgccttgagagtttatcaactccccacccataggcatttcactttctcctcctcacatgattttgtttcacctgacggtagtccagctgaattctggagataggcagttcaagtaatgggagaggtcagtgactcagtcttctatgtgggattaagttttcccttccccaggaccacaagaatgagcagagtatgtggatcttactttgaaggaacgaaaacaaacaatcctatcatttaataggagctttaaaagctttcgcagcatgggtgagtgtggccatcgagactgtctggcaactgcccctgctaacagtggagatttattatcatagaaaatcatttcaatctgcggaggttccaaagggaccattttatggtcatgggcataattaatagcagaactgtttgggaaggacgctaatatttattcactgcctaccacgcgcaagacagagagtgaggtgggaggctggtgccattctgattctgcagaagagaaagctgaagttcaaggaagttaggtgggttgcccacagttataagcctataaacagtagcgtgaagacttgaatccagatctttgcacttcctgtagtgtaacacagggagggttcagtgcattttgaatctgctagtttgtctcttttgaaaatgagagaaaatctgtggggaaatatgagaattacaatagcttacccaatcgtccaaaggtcacaaagccccagaatttggaaaccttggggtaaaagggagatcaaaacgatgattaaaaatgaaaaatcaaagtctcagcttctgctgcctcttgacaccaggcacagatacacttttaatgacaggcttttatcagatattgccgtcggcagatctcaatgccagggccgctaacgagtggagggtaaggaaggtcacaacacagaggatacaaaataaggatttgaagccatgtccgtctggcaagaagaaattaagcgaaactcaggaagttcttaaatatgtcgaaggagactgtgtttcacaacttctacaaacaaattccaaaatacgtagacttctaggaagcagagaagttagcaaatcgccaaggtgttaatagtcggttcttggtattgttaaagcacagtttgatttgcacatctgactgaaatacttgctttagcaagcacactctttcctagtagtgcctcttaatgcttctactaaaaggcaactcatctttttgatggcctgagcactttagtcacaaaaataaaatttactgagcacatactacgtgcctggctgtgactaaggcacaggggatacaaatgaaaacagaattacacgttaacgtttatggagttcatagctggatgggaaaagcagtcaagtcaacaaggaattatggcatgtagacttcatgtataacatgaaggcaggacaaggtgcccagggaaatgcagtagatgggtacctaactcagtcttggaaagtcagcaaaagcttcccggttaaagtgccacctgagctgagacccaaaggatgagtgggagttaatggagtgtattctcagtggaaagagaaacatgcacaaaggaatagggatgagagaatggggtgtgtttggggaactgaaagagattcagtctggacagactgttaaggatagagatggcaggccgggcgcggtggcttatgcctgtaatcccagcactttgggaggccgaggcaggcggatcacgaggtcaggagatcgagaccatcatagctaacacggtgaaaccccgtctctactaaaaatacaaaaaaattagcgggcatggtggtgggcgcttgtagtcttagctactcgggaggctgaggtgggagaatggcatgaacccgggaggcggagcttgcagtgagccgagatcgtgccactgcactccagcctgggtgacagagtgagactccgtctcaaaaaaaaaaaaaaaagatagagatggcagatagatgggtgggggctcaccttctataccatgtgaaagcattagggctttatcccaactgactgttgcaagggtttaagcatgaggataagatgatcatatgtgtgttttagaaaggtcatcattctgtgcatgtgtttcagaaagatctgtttggggatttggagcatgcaaggcagggtggtggggtgtgggatggggagggcaagaccagtagcaggagacccagcagctggagttgctgtcatccaggccagagatgggggtagtctagtccaagttaatccattagagctggagagaagtagacagattcaagagctccttaaggggtagactgaaccaaccacatcttgagattgttgtcagatgtgtggaatgaggtagggaagcagtcaagaatggcttccaggtttctgggctgtatggctgaggataccagctcctggaccacagaaccctgcagaaggagcaggtttcaaagaggtggtgaggagctccattttggaaatgctgctggaggagtggtggggtacagccaaggggagctgttccataagaaccaccgtcagaatctcaggagagagatccagatgggttgtggaattgggagtcatcggcacatggatggcagttgatgccaaggctgacatcatgtgacaaggctagctccagcagccctgtcttcaaagagggtctggaagctctcactttttcctggtttgtgcttgtcggaccatatgcaagtaattaaaacaggacattcattaacatgccactttatgccttttagtctccctatgtctccagggctagtgggtgaggtacatagagagatgccatgcacattttatataggaccaagttcatgcaatgccaagcagtgacagagcccagctcaggttcctccaggtgctcttctgaccacactgtaattcctctgaggtcaccctaaagaaaacactcaattcatagacaatcatgacaggactgaaattcatgatgacagataaaagggggcatcttttctaccaggctcagtggcttttagcctctgccatcctcaccccctcacccttgccctccactgcagcacttctcacctggtgttggcctgtctacccccagcgggtctcagaggaagggccgtggctccatggctcccaagtctctggacacttggccaagcgagggttgtaagtcatagcccaatcaggccccagctgctcaaagatgcaactggaggtgatgccgtaacataaagagatagccccggaagtgatgcaataacatagggatgtggtcagtaaattgggaatgggagaagaaggagcttttcctgctgaccccggaaatcatggtgccatggagagaaggtaaagtggagatcaccagggcttggggctttgttttggttttgtctcagagcagtgagattatttttctaaaagacaacttgaagggaactccagtatgtaaaatggtttttaaaaaaagacctgccctaacaaaagtaggagccctggggcctgagccagcttcctcttcctcaccccatacatactcagcccgggcctccgagccttcttgcaacacttttgaaaaccgatagtttagtccataccttccaggatggtgggaagtacataaatttgaaagcatggaattatagtcaaattcccctgggtttaactctagccaggctgtttattagctgtgtgtattttggataggttatttaagttttctgagcctcagatttatcatctgtagaatggggagggagtacagaattgctgtgaaggtttaaagagaaaaaataactaaaatattgagcactgtgctcagcattgagtatattctcagtacatgggaattattgttatcaattgctgaacatttagatatttctagacaagctggaaatctggattttaatagatgggctagaaattgggatttttataagaatctcccaatttttaaatgttggcaagtaattttaaaaaatgaaaaacattgtttgagctcaataagacacgctcccgcagtcagtttgggacctctgtccgtgcaggaaggaggttagatctggaggggaagggcaggagcccagagcttgggtccctgggcaggacttgtgggtttcagtcatgggtggagactggccctgccatcctgctgtaaatgcaaccaattctcaaccagaaaatttttcaatctacctatagcctgcttccagttgtcccaccttactgaaccaaaccaatgttttcttttgttgttgttgcttgttttttctttctttctttttttttttttgagacagagtctccctctgtcacccaggctagagtgcagtggcactatttggctcactgcagcctccacctcctgtgattctcatgcttcagcctcccaagtaattgggactacaggcacgtgccacacctgactaattttttggtattcttagtagagatggggttttgccctgttagccaggctggtctcaaactcctggcctcaagtgatccatctgcctcagcctcccaaagtgctgggattacaggcatgagccaccacgcctagcccaatgtatttcttaaatgtatttgattgaagtctcatgtctctgtaaaatgtataaaaccaagctgcagcctgaccaccttgggcacatgttctcaggatctcctgagggctgtgtcacaggcctctctcatatttggctcagaataaatcttttcaatggcgtgtgtggtggctcacgcctggaatcccagcactttgggaggccgagacaggcagattgcttgaggccaggagttcgagaccagcctggccaacgtggcaaccccatctctactaaaaacacaaaaattagccgggcatggtggcacatacctgtaatcccagctacttgagaggctgaagcacaagaatcacttgaaccctggaggcagaggttgcagtgagccgagattgtgtcactgcactccagcctgggtgacagagcgacactccgtgtcaaaaaaagggaataaatctcttcaaatattttacagagtttgattctttttgtttactctgggatggggactggggtatgcagggaggtgtgcatgtacacacttatgtgtgtgtgtgatggaaggggttaacacccagctgtttgcagaccacactaggtgctatgcacgtattacttcatggtcaatctattattatccccattttaagactgagaaaactgaggctcagagaggttggagaacaggctgaggttcagtaagctgtcatagctgagctgagacttgaatgccggtcagatttcagaatctgggctcctcgcacttctcaccacactgcctgtcccttactccccccgacctccttgtcctctctcctgccacttcttcccttccctttccaagaatatcctgttttacccactactgtaattaccagtattatggttatactttctgttatccatttcaaggatgtcatagattatggtttatcaaatgctcccatgaacaagatctcatttggtcccaacaaaccctgtgagatagacaggtgagtattaagcccactttgcaaaggagaacagagctcagagaggtgggagatatacgttgtgcacaaagacccctgctcttctgtctccaaatccagggcttctttgctcacgctgctttaccgagctccttcaaggaggccctgcaaagccaaagtcaagtgtgtgctgatcggcaggtacacccaatgtctgtgaaactggatcttgattttaaatttcaatattttgatattttgttcatcctggatttttgacaccaattttcacttaaaaatattgcattaaaatattatttgattattgcgtttatttggtgcccctaaattttgcaccacaggcagtgcccccactgatctcaccccgatcccagccctgcgcctgtctgtaccagtgtaaggattacgttgtgattgcaactgtgacgtaagcatgtgagagcgttttaccacagtgccgagtctgcctgccttttctgacccttctttgttcctttgtttggttcggagtgtcactcccctaatctcccttcaaggaaccctgtctgactggaatgatctagtaggagtgggtgggcacgttgggtgccaggacagtgatgcctggccttggaaggggggcccttgctgttagctggtgggcgctctcagtgctttgggcaagtgaacataatgaagccttgtttctggaagggatcattcgggaataaactttcatggataccttcttgctcaccccatctgctctcccgtgctccccctccagccctgttggccactagggaaatagaaggaacagcttgatcaaggtttttcctagaaaagcctttccatgggcccattatggaaaacgaagctgtttttgttttccttgattaatcacagtgtcttgtttcccaaagcaaatgtggccttggctcttccgaaagaacacaggctgtgctgtaaagaagggctgcagccgcctggtgcttgacaaggtccccaagacgggaagggacacatgtagccctgtcctccaggactcggctcttccttttttaccttccagggagctcaggttaccagtttcctttgtgtttttctgccagtgtgaacaggagaaatattagcctttagagatttctttacagttccttgaaagctggaggggtgaaatcagccagagaattatataacagcaaagctcatttaaagcaacagtgtctttctatagggctgtggtggttccttaccagtttttgttactaactataaagaaaaggatgctaattttgtgaataaaatagaggggcattcccttccctcattactttctgtttgttcattggacggacacaattcctagggtgttgatttaaaaaaaaaaaattgaagcctctttcaaggaagactaggggaaatcatgtacattaacctcaggcagacacggcatacttattcttgttagaagtcagaagaaaaaaaataaagagaaaagctttctaaagcatttgtttgttttaatttaagagtcacggggaattttataaatactcggctaaattcttcaaagggagccatgttctttaaatttaagcactaggctgggcgcagtggctcatgcctgtaatcccaacactttgggaggctgagatgggccgatcacctgaggtcaggagttcaggaccagcctggccaacatgatgaaatcctgtctctactaacaatacaaaaattagccaggcgcggtagcatgtgcctgtaatccgagctactctggaggctgaggcaggagaatcacctgaacctgggaggcagaggtagcagtgaaccacaccactgcactccagcctgggcgacagagcaagactccatctcaaaaaagaaaaaaaaaaaaataagcactagatcatctattcctacgttgtttgacctagagcttaaatacatctcaaagtgcaccacacacattagctcagctgatcgccatactcccttgatttgaccttctctttcttctcattttagagatgaggaaactgaggccaaaggattctgttacttgcctggcttcacagctcacctggagattctgaactggcatcttcctctctctgccatcaccccagaccctaccctctttcctctacaccagtggttctcaatcaagggcgattttgccttccaggggacatttgacaatgtctggaggcgtttttggttgtcacaattctgtgtatgtgtgtgggtgggcggggggcaggggattatgttggcatctagtgagtagataacagagatgctgctaaacctacaatgctcagatggcccctaacaaagaagtatgttgtccaaaatgtcaatggtgcagagggtgagaagccctggtctatacagagctcagcagtccagagcaattgcaacctctgggagttgccaagagctcctctgcccagcaacaggcttggcctctctcctgtggctgccacaagagttaaagccactgtctggaatgccctttggcagtggccaagtgtcccctgcagaactgactgcgggacatgcggtgcatcagccggagctgatgtgttttgtaatttatagtcacagggcgcctgtcttcatttagcagtaggcctgctggcagcttccctgccagggaggaagcaagttccacagaggcccacagcccccgccagctgccggcccgtggtatttggggacggctgttgctcagagacacctgggaataggccggggccgagatggcgctgagcactcggtctccccttcagacccatccatcagcagcggtccctgccagaagatggcctattgaacatttccagaaatagcacagccaagcccgtcaactgctttcttggaaatacattcaataaggatggcggtcctccagcagggagagcagaaagcctggcctggatcagtctgctgagaaacagcaatgcctggctacaggccatgtcggtgccttgggaaaggggagcggttctcatgggacttcccaagccctgcagcctctgaagtcacttcaaaatgttctcagtatggagggagagagtcacaccttgcagaaggccttaggccctgccgacttcttctaactcagtgacctgcacatcttgctgtgttcgttcagacaccccgcagacaggaaggcgattcaggcttggaggcaaggtattaactgtcagcagagagagacctctgcatcatctggggaacgtttattgcagtccctcctcttgtgagcttcactcccaagtagaaccaaaggagcatcagcagggggagtattttcttccccaatccttcggtcattcctgaggtacaggaaatacaaggcaaagatgtcatattgaaagaaaagcttataatttctactcctcccctccccacttcccacagaattaactttcccttaacttccctaacaggggcctgacattgcggtttgaattcagccaccctgggaatctgcaccctgagctttctccaatttctgggatggcacagtgatggcagggcttaagagtgcctcaagaaggccagctgcctttaaaaacaagctcctggaagatgtaggtgtcacataaaagcaagagaccaaaaactctctgcaatttggggtgttcaggaaatgttgattgatcacattttttaaattataagagactgctggacatggtggctcactcctgtaatcccagcacttcaggaggcccaagtgagaggattgcttgagcccaaaagttcaagaccagcctgggcaacatggcaaaacctcacctctacaaaaaatctaaaaattagccaggtgtggtggtgcacacctataatcccagctacttgggaggctgtgtgggaggattccttgagcccaggagactgaggctgcagtgagccatgatagtgccactgcactccagcctgggtttacagcaagaccctgtctcaaaaaaaaagtgtaagacagttaccaggttcatcataaaaaattcgtgggacctggttttatttgcaagagccactgactctcaggacaaacaagatttgaagcccacactgagctataggtggaggcagggctgtgagaatacaatacaggatgcccagttaaatttaaatttcaggtaagcaataatattttttgtataattgtattccaaatattattattatttatctgaaattcagatttaatgggcatcaggtgttttgttcaatctgttcactccatttggggtataaattgatctagtttttaaactgataacagggaacactgacacatattc

SEQ ID NO: 130 - DNA, 25584 bp, Homo sapiens
  source 1..25584: mol_type = genomic DNA
ggggattaaagatggactgagagaggttagtgtcccagaaaccaaggggcaatccctgccctggagagaacaggcctcaagggcagggatggggcaggggcagtggataaggagtctacccaggcctttttgggttccctcctttggtccctggggacccagggctgtggcacttgccccgggctagagggtcggccagggcctgtgtggtgcccactgctccctcccctgcactgcaggggacccttgcccatccctctagctcatctggacctccctcaatggctcctgctgtctttccaggctgtgtcctcccgtgtcagggacacatcccagagcccagggcctgcgtgggctgtatccacggttactgaatagggacaaacaggcatgtattggcaggggccggtggctcatttcaggaaagtcccttcagcaagaggattctctccccactggggctgagggtggtagaagaaaggaatgttgttctatgttgtagtgtctctgagatgacctggcttcctgaaccaggtccccctgaagagctcctcctgtccaccccaacaagaggccagctggagagcaagcaaacatcgagtgcagcaggagactataaggttagacaacaagaaggacttcctggcaggggagagcaatgcttgcttggttagagctgcctttcagtagaatgggctgctttggattgcagtgaggtcgctggagttgcaaacagcagagccagagatcaaggtcaagtggaagaaagctgggaaaggttcagtttggctggtgaagggtggagagggtaaagggaggcagggaccaccgtggtgcaggggtgaggtgccctgcagggagctgatcctgaggccgatggtgggaggagctgtgtgtggtcgggtgggacggggtggggacagcaggagacactgagaaggtggcatggccaggagctaggggctgaccgagtgtggggaggggggagtggggagggggcgttgggctgcccgatgggaggtgccttggctccgatgggagcactggggagcagcaggtggggggacgagctgggtgggaggggctgcagcttcccagcagagacagggtctgggaggcgactggactcgaaggcctgggcttgggagagaggcccgggctggagaggtggggagggggatccaggagaggggataactaaggacttgggagtagctggcatcacctggtgagacgagagtcctgaacagccccctctccaaggacagaaatttctccaaggaggctgacctgagaggtgggaggagagtggggcagagggtcaggagggagaaaccagtgggtgccaagaccaggtcagccccacaggctagggggcttgaggacttggggctgatgtctagggacgtccacgaggtggagcagcccaggaggcctgggtgggaggaggaggcggtggcggggaggggagggaggggctgggcctctgtccacagcattagtgctggttggagggacgaggggggtgcggagccagccaggccgccctcccgttctcacagcagccgagcagagcgcagagcgggctgccatggcgctggccaggcctgggaccccggacccccaggccctggcctctgtcctgctactgctgctctgggcccctgccctttccctcctggctggtgagttggggcccatgtctggaggggcctgggagagggtctgtcccccaagacagataccccaagccttggctgctggggtggtgggtgggctggtccgcgtgggtgcaggcctgagctgtggggtgcacaggagtgcgcggctgtggcccccagactctgtggggctccacggaggtgagtgtgttctgaggctcggggctgtttcatgttgaggggggttgtaagtttcggggttgggggatcgggggctgggcatgatttgggggagctgatgcgggtgagggatggggtgcgtgttttgggaggtgctgtgttgcatcctgtaaagggctgggggacttctgggtttctaggggctgagtttggggagttgcaggtggcataagcctcaccccagagcttgttctgtgtcgcatgctgggttgtggggcacaggttgtgggtgtgttagagttgggaggtggatgagctgtctggggtgagccgtgagttgtgtccgaggagttgggtgtggtgagctgtgtcctagcacacgctgtggggtgtaggttgtccagggttgaactaggtctttgctctcaacatgaggggtgtgggatgtgcacagccgaccccaactcgggactgagtggagaagcgtgagggagactcagggagctgggtgcctgcccgcacccctccatttgtgcggtagccctgcctgtgctgagggctgctggggatgctctgggtccctgtggggtggctggggatttgggaacatgtgtgtgtcccctgctgccccctccccagcattccaaggccaatctgaaagggctccctgaagccagaccacatttgccaagccctttttgcttttgtccaagctctcggagcctggaattcctcctggggggtccaagggaacgcttggtgttagttactatagttacaggggccgggcctgggaagtcccctgcccccaccaccacaggctggggagggagccaaggagggcctgggctctcctgaggctgggggagccctccctgccccagagctccacaggctgtagggtgtgggggccaagtgtctcccagtcccacctggggaccctcatgtttcccgcactcacaaagctttcatttcctatcctctctatggggccctagggaggatgaggaccccattttgcagtgaaggaaaccaaggctcagagagggacggggacttatgagctgggctctgctggcaggcgacttgggctccatagaggggtggggcatggtggcggggggcggggtggctgctcctctctgttctctgcatacaaagcacgtgagatcccggtctgtggatcggtgctctgtcccctgccctgtgatgctcacacacccacactccgcacacctgtgtggcatgcccaagggcacacagcaccacagggacaggtgctacagacacatgtggatctaccagcacatgcacctacctacacacatggcatgtgcctgcacaccaatgtgcacaccccaacacgcacatgtggacatgtgtgcattcacactcagtgtgcactcacaggggacctggaggcacagagtggatggaggctgtggggggtctggacactggtgtgtacactcaacccatcaggcctgctgggttgcccaggggcagcctttcctctgccatttctgtgctgggagcgccatccctggggatccctaaaagttggtggggtacactgcaggcatgaccatttctgcatgctggtaccctagactgcctgccgggaggggagggattggggattttgtcacttgaaaaccaatttccatcctggaggggatgggggcttctggaggccatgggcccctggcttttctccccacccctgccaggccctgagctgggcctctccatcctgggcccaatttgccacaaaggcccggctggttgccatggagaggaccaagcatcttggagtacaatggggcacgttgggctctcatatccaccctcccttccccaaacacccagggagcccagcagacaaaggggcagtgagtccaggccccaagtccggcccctcctccagccagaagggggtgggggcctgcaggacagaagcagagatggagcagaaagccacacacattcaacccaatgtcaggatcctttggacagtgggtgtctgcctcaagtaaagaattgttaatgagtaagatcagccactccatggcaggcactgtgctattattaacgaggtctaatttaattctcccaacagcctatgaagtcagctctgatacccctagtttacagaggaggtaaacgaggcccagagatggccagtcccagagccaggaagccccagagccagtgctgggatttcacagtacactgtgctacttgcctaggcaaagtcacgtctcttctctgtctctacaaaacgaggacagactggcttactccgagcgctggtataaggattggaagagaatgcagtgagcggttccccaccccaggttttggcatggaacccccaatttcaagggaaattttagatggaagcccatgaatagttaatagtaaaattgttaaaagtggcctgtttgggtggcaggtggggaaccccacctgctctgtctccccctcacttcaggaggtaactccctggaactgtgctctgagcccaaactctcaagggttggtcagtgccaggcacagggtaggtgctccgtccctgacagctattgttgcaattactgttatcaaaattatgtcttttaacctcagaaggtaaacatttttgaaaaagagtatgccaaattattctgcccaaaagagaatttcaccctttcctgatgactgagtgagtgtctgcaagcctccatggttattcagccctacccttgtagggtagagccttggggcccagggatattagatgaacaatttcttcccctatgctagaagttcccacaccttatgagatcttaggtcgcttcttagaaatattctgtctcttgatttgttgggacaggaagcttccccagtaaatgcttctttttttgtttgtggtttttcgtttttgttttgtttttttttttttttttttttttttaagaaagggtctcaccctgttgccctggctgcagtgcagtggcaaaatcatagcccactgtagcctcgacaccctgggctcaagccatcctcccacctcagcctcccaagcagctgggactacagggacccaccccatgcttggcttatttcgttttgttttcatagagccagcgtctcactatgtttgcacaggctggtcttgagctcctggcctgaagtgatcctcccacctcagcttcccaaagtgctgggattacaggtgtgagccactgcacctggcttcagtaaaacacttctcatcagttgttggctgttataaacaggcccattctaagtgcatgaaaagtaggagttactaatgagtgaggcctgagacacagtgggattactgacagctgggttctggatagacggggaagattgcctgctctgcccaggctgatattggaagctgtattcctgtgaaaacctttagagattttttttttttcctgggtgaggcagctgtaatgtactaaagcaacaatatgtgagtggcaatttagggtttgtaaagtgaaaatttcacatgcattgggagatgtggacctctgggaaatcaggagctgatctgattcttcgtctcaacctgggcaaaattatcaacctctctgagttacaaaaacagaaattttcttaatggcacccaccttttctggtctgaatcaagtataacaatgtaataatagatgcacaggcccaagcacatagtacacactcagtaaacagctgggtcctcctgcccctccccaggacagggcagcaggtcgaaggggaggggcgggcgtcggttaatccctccctgccaggtcggcccaggcagcctgaggtcaggagggatttgtaaagataagcacaggcccctcgttgccctggcaacaggccccgcccctccagcctggcccgggaaggggggacagcccctcctccgccctgctgccctccacaccccgcccctccttgcctctcctgtctggcctgggctatcgtggcctcctaggctcactcctggaagacagagacaacctgaggtcagcggttcccacacctaaaagtgaaaggaatcccccaggagcaggttgcgatgcagattctcaggctcagggcccagtggttctaaatttggggtctggagtgggttccaggaatctgtattcttaatgtgggcccgtgattccgggaagcttggagtgaggccctgggtttggattccagcctcccttgggctgtggactgtgaggctgcttcgagtctccctttcctgagctgtaaaacaggcatcataatcctatccacctcggaggtaaatgccaagatcaactgagatgacacatgaaagatggctgtccctcccaggcaggactgtggcactattgcatgcctcccaggacgggcagctccttcccttcctgcctggctctgactggagaaattccttcctcccatggggttggactctgtctcccgggctctgtcatttagagcccatctgctcccatggtcctgggaagatcccttgtgacaaggcacctcccccgccccccaggatcctttccccggtgctgcctccccagcgtggtcccagctgctctgagatagggggcaaagcttcagattggatgggcggggaggggggggggttccttgcactgcacaggtgagggacagtgctctgtgggaattaagtgagggacctgttggcacaggcgctggcagccggggccctttaccatgggttatgagtgctgcaccctcctgagcagtgctggccacacccagtcccagggctgtgccctgcatcaccttggtgaatcctttcaacacctccatgagatgggcactttttgcaccccagatacaaaccaggactgcccgatgccccaaacctgtgccctttcctgggggagctggaaggatgcgggtcaggccacaggacagccctgcctggaatgcggatgacgcctgagaggctgccagccttatctggggggcttcaccagagtgggggagggaagggtgcagggtctgagctgttctggggtctggtgagtgtctagatgacaacctgggtgggggaggggcacctttgggagctccggatgggggtggggggaggaatggaggctgtgtcttctggaggctctcctcccccatcccttaccgagttgttaccaaaagcagcccttgactgcggtgctggggagctgaatagttcagcatttgatgaggggattcttttatgatctaattttcagactgggaaacggaggctctgtaggagaaatgacttacccagggtctcatagctaggaactttctgagctgaaattgaacccaggtctgtttcacttcaaagctcaagttctcacctgggcattgtggtgacaaggctctcaggaaggcaggaggagaggaagggggatgaggatctctgggcgtggcttccaagccggttggtgaccctctgttagagccccggtgctggaagcatcatggtggccaggggcaggtgtccgtgagccatctcaatacctgctctgtaccatgcgaccttggccaggccggccactcaggtgtttgctgatgggggatgaaattagggccagggaccctctagaagttcctaggccagtggctggcagggggtgggtagtgatgtggagaaggggtaggaatgagaccagcggagcacacgatccctgcttttgaagttgtccacccatcctccagaggttgaggtcgggcccatctccagtttcacccagggatggagttaccagacccctggcagaagaggtggagggggcagtgggaggagcctcaccctctggggcctccttggatggatggggcctgcaggagggagacccctccccaggtggagctgaaataatccagatagaccttgaagcctgtcccagcgaacactaacttgctgtgtgaagtggacagggctgggcaggctcagcaagccttcactttctttcctgggcctccttttgctgtctggtgcaatgggcatgacggatactgcctcaaagggggactgcagggacaagacagtggagggaagctcacggggctcagggaacctctgctcactaatcctgcccagaagccagacatccttggtgctgtttctctgctatataggctctcctaaaaccgttcccagttctgggtgcagatgtgtgcagcttactgggacctggcttgcagacccctggccctctgtccatactgtgcatgcagagacccacgttgcttttggggtctggggtgggcctgagagggtggggaggagattgtccttgtaacctctgcccaccctgcccagccagtttcttctttctacagggacggtgccttcagagccccccagtgcctgtgcctcagacccgtgcgctccagggaccgagtgccaggctaccgagagtggtggctatacctgtgggcccatggagccccggggctgtgccacccagccatgccaccacggcgctctgtgtgtgccccagggtccagatcccaccggcttccgctgctactgcgtgccgggtttccagggcccacgctgcgagctggacatcgatgagtgtgcatcccggccgtgccaccatggggccacctgccgcaacctggccgatcgctacgagtgccattgcccccttggctatgcaggtaacagcctgggccgccctgggaggaggtctgtaatgcagatcgcatcagctgctcagagtgtaagcatcatggcttcagctttgcctttcgtgtagggacgcccccaggcatccgggcagctctagggtatatccacttggtctgactacagaactgatgcctggcagctctgggtgagagtatgtatgtgcgggtgctggcgtggtgtgtggcgcatctcaggcactcggtaaatgtgatttcagtccagcctagagttcagtttggctgcgggggtggaatacccctcattcatctctggcagtgtgaacctgcctggcgtgactttagtgaggatgcccagatagtctttctagcacttcaggcctgtgccaagctgtcatgtagacactgtctacacgacagtcaccatcagctcatttgaacactcctgatgtggtctggagtgcaatgtggacccctggcctctgggtctcccccagagttctagcatagacatacaaggtctcgttcaaactgtagtgttgacataccccagggatcgctgctgtctggagtgggataatatatacgtaagtgctcagaaaagtgactggcactaagggtaccttctccagagtgtggcccgtcccaggcccacccatggtctgagccgagaacatcctggagcggcttcccagagaggcctgaagtcgggaaggagggcgcagctggggacagaaggggcgcagtctgggagcgaagctgagtccagggcagagtctgagtctgcagtgtagatgctctggatcctacttcaatcctgaattcagacaactgtactctgagggcagagggcagtttgaagtcacttcagagcaagaggtacagattggggggctgggttccagggcagggggcctacagcgaagagatggcagctgatgaagagagatttgggaagctggttccatgcatctttctcatcgttccagtgtctcagcgtctgggtgtattagtgtacatgccagtgcaggtcacattcgtccatgtgtctcctagttccaagttctgttttgcatctgtaaagatctgccagtacctgggggtgtctgcagtctgagtgcatgtgtgggcagtgggttgttcgggcagtgggttgtgtgggcagtgggttgtgcgggcagtgggttgtgcgggcagtgggttgtgcatccggatgtgtagcactcacacacttcgggtgactcttcctgggtaagctgtggatgtgagtgggggcagcatctgccgtgactcattctctcctctttccattccaagccgggtgggggagtttgggatttccagacaaggcctggctccccctggcacagagggtgggagtggggatggggagggaggagggaagggtcatgggaaggtggggccatgttttgtgctcaatgaactgagaagggggagggttccagctggagtcagctgggcctctggcccccgcttgaccaaacccacttagggggcagggcctgctggagtctacagtgacacgtgagtccaggatgatctcaggcagcgtatctgaaaccctgggactccccatctcccttcctcttcaccatcaccctgggagagccactcagctgtcgtgattcgcccaggactgcgagggttctggggacttggtactttcagttctaaaaccaggacagtgcagggacactgggaggagtgattaccctactcaagcatctcctgcctctctgggatctgaaagccaccagagtggaccttctaaaaagtaggtagggccaggtgtggtggctcacgcctgtaatcccagcacttcgggaggctgaggtgggtggatcacttgaggccaggagttggagaccaacctggccaacatggtgaaacgccttttctacaaaaaaatacaaaaattagccgggtgaggtggcatgcacctgtaatcccagctactctgcaatctgaggcacaagaatcacttgaacccagtgggcagagattgcagtgggctaagattgcagcactgcactccagcctgggcgacagagtgagactctgtctcaaaaaaataaaaaacaaaaacaaacccaaaacaactaactaaaatgtaggtgggaccaagtcacttacctgtctgaaactttcaggatggacccagaggttacctggtccccaaggcactgacacctcccacccgactcacctccgccaccctctcccttgcttccaaccctccaataaccccgcctagggcatcatggccctgcccctagtggaacttgcctcttgctgcagtctctttggaatccaactgctgcccacagtcccctatctgaatccttcaaaagcctcttcttctaggaagccttccctgaacagagcagaccccggctattgctttcccaagacccaacccctttccttgttgaacttggcaacatcacctagctcatttaggtaattactggctgaatcaccccccaccatgtcctggcctagactgctgtgagccccatgaaggcagggctgtctgtctcgtttctctccctgcggttgctggcatgacccgtcccccaccccccaaccaccaccaccaccatccggctctgaatgaatgaatccacgagtctctaactctggagcaggcctggcgcgacctcttccgccctgctctgggtgtccatcctgcaccctgtgtgtcccctgccctgtccaggcgtgacctgcgagatggaggtggacgagtgcgcctcagcgccctgcctgcacgggggctcgtgcctggacggcgtgggctccttccgctgtgtgtgcgcgccaggctacgggggcacccgttgccagctggacctcgacgagtgccagagccagccgtgcgcacatgggggcacgtgccacgacctggtcaacgggtgagcgagcggcggggcaggcggcaggggcgccgggtgcccgagggcggggaggccaggcgcggggcagaaggggcaggcgcgcgctcagctccgccggtgcgccctccccaggttccggtgcgactgcgcgggcaccggctacgagggcacgcactgcgagcgggaggtgctggagtgcgcatcggcgccctgcgagcacaacgcgtcctgcctcgagggcctcgggagcttccgctgcctctgttggccaggtgtgtgcgtgcaggtgcgcggcctggcggggggaggggtaggtgtgcgcctgtgcggcctggggcggtggggcaggtgtgtggctgcacgcgagtgcccgctgggtcctcgggaccagagtgtgtgtgtgattgcaacctgtcggagcctcagtttcctgatctacaaaatagggctgatcgtagcgcctgctcctggggttgctgcggggagctcgaaggtgcgacgcctgggaagcccttggggagggcctgacagctgcaaagggctcagtaattaatgctagtaatagtagtaagactaggccgggcgcggtggctcaagcctgtaatcccagcactttgggaggctgaggcgggcggatcacgaggtcaggagttcaagaccagcctggccaacattgtgaaaccccatctctactaaaaatacaaaaattagccaagcatggtggcatgtacctgtagtcctagctactcaggaagctgaggcaggagaatcgcttgaacctgggaggtggaggtgagcagagatcatgccgctgcactccagcctgggcaacagagtgagattctatctcaaaaaaaaaaaaaaaaaattagtagtaagactagtaatagcagtaataggccactgctgctgaaggctgccgtggtcattcctgcggcccttagtgtgtccctccctcgccattcgtggcttattccgagctgcggtcccttgctggccctcgctagcctggtcatagtgaagaggtgctgcccggcaaccccgtgagacctgatgtccgcgtgtgtgtgcccccaggctacagcggcgagctgtgcgaggtggacgaggacgagtgtgcatcgagcccctgccagcatgggggccgatgcctgcagcgctctgacccggccctctacgggggtgtccaggccgccttccctggcgccttcagcttccgccatgctgcgggtttcctgtgccactgccctcctggctttgagggtgagcccctgctggggaagcggtcagcccatgtccagatgcccagggagggatcttgtgcccacccccccaccccccccacccccccaccccacaccccacacccgagtctgccctctctcttggactcagtctctctagctatagaatggaccctctcagcccctgcctggctctgagggtgcaggtgggacccacagctgggcctcttacaggagccgactgcggtgtggaggtggacgagtgtgcctcacggccatgcctcaacggaggccactgccaggacctgcccaatggcttccagtgtcactgcccagatggctacgcaggtgtctggggtggggtgggccctgggaccatcagaattggtggtcctcaggtgagaaggtcccttctgtctggatgtgtggattgatggggtcaaggagatcagggaggaggtgggtatggtggcccaggtgaccgctgagggtggctgaactgggactcgctttggaggtgagactggggctcaggagtgtagtcctggcagctggggccatagtgggctgaggttgtctgggagaacgtgtggagggatggtcttcagggaagacggaggtggttcagccaggacagagaaggaaaggggggctattgcagagagttagggggcagcatctgtagaaggatgactctgacctttggggagctggggcctgtcaggcaggagttgggggttcagaagtctgcccctgccttgggtacacgcagatgcacagacacaggaccccggtgagcccagggagctccaccgccaacactgaacgtccctgccccctctggaatgcctgcgacacctccctcacacccgcccgcattcctgctggggcacactgcctcctccccctggcaggctcctgggcacaggctcctccaccaggggaaagagatggtggtcacctcttcccctctctcactcgcctgaagatggtgggactcagtgtcccccagccctggatggctgacactcctgggggtcccgaaggcccatccactgcctccatgggccgaggttccccaagtcctgctccaagagccatggcctcctgggtacctggcacacagtgggcccacacagcacgtctggcctctgggaagcatttgctctgcattttgttttttccttgccacagccccatgaggcaggggtttaaaaccccatcttacagctgagaggatgagggggtgtcatcccccaggttcaccactatcagcgggaacccggctcctctcccagttgagctcactgttgggtgacagggagggcagacctctgaggtcagagccagggaggggggaccccagctgcagggctgggctctttgcccatcctccctccctttaggccatgctgggcatgggggaggccagtgcctggcattcctgagcaggctccgaaggaggcagctgggccaggcagggagctctgcctcctccccacttccccagcctcagtgcccgcccaccactctcaacctgtctggagggcatggcaatggagccgggggctctgtggaccttcctgggccacctgtggctcctggcaggtatggaggaatgtgggccctgggcagggggaggttggtgggtggtggttcctaggaagaggctgtggtgtttgtgagctgatcgaggctgggcttcaaaccctggtgacttctctgggcctgggttcctccagctgggatgtggctctggctgagctacagtgggctatggcttctggacccaagctggggcctgagcacctgaagggatccctagagggaggatgaggcagccccttcacagccagtgtgggggccctggggcagagggactgaggggttagagcctgggaggccactcagagtgccttgggtacttgcactaccccactagctcctccatgccatcactctgtccataaaagccatgtcaggccctttgctgggcaccaaggacatattcaggtccctgaagatctcagctgagtaaacaaatacttttaatacagggttctggggagctgtgcctgggactgcagagtgacacagtagtttgaggttgggagttagggaaagcctctgggccctttgagtttgggctttgcaggatgagtaggagtttgaaaggaagggtaagggtgaatgaggcattccaagcagacagaacagtatgagcaaagccccagagtcacgactttccaggaaatgctcggaggaatgggacgttcaagatttgtgggaagcaggattgaggcttgagagcctggtaggacccagcccatgagggtgtcttaaatgtcagggtgagtgattggacttcaggcggcagaggaacccagcctggcgatgctttagaaatggacctctggctactggtggagatggatgggaaagggcttctgaaggctggcgaactgggggatgcgggatggtagcccagacagctggtaaggcaggagatggggggtaggagaaaggggcattggagaatgtttaggagattaaatctacagggcctggacactcaccagacatgagaagggaaggggcatcttggcttctggcctacggggggacttgaggggaccatgagaaatcctctgggaattggtttggctgataggtactgaggtccccatcataagaggcatgtaagttctgggtcagtactgtgattctggccccagacattactgaaccttggctttgtctctcccaaagggccgacatgtgaggaagatgtggatgaatgcctgtcggatccctgcctgcacggcggaacctgcagtgacactgtggcaggctatatctgcaggtgcccagagacctggggtgggcgcgactgttctgtgcagctcactggctgccagggccacacctgcccgctggctgccacctgcatccctatcttcgagtctggggtccacagttacgtctgccactgcccacctggtacccatggaccgttctgtggccagaataccaccttctctgtgatggctgggagccccattcaggcatcagtgccagctggtggccccctgggtctggcactgaggtttcgcaccacactgcccgctgggaccttggccactcgcaatgacaccaaggaaagcttggagctggcattggtggcagccacacttcaggccacactctggagctacagcaccactgtgcttgtcctgagactgccggacctggccctaaacgatggccattggcaccaggtggaggttgtgctccatctagcgaccctggagctacggctctggcatgagggctgccctgcccggctctgtgtggcctctggtcctgtggccctggcttccacggcttcggcaactccgctgcctgccgggatctcctctgcccagctgggggacgcgacctttgcaggctgcctccaggacgtgcgtgtggatggccacctcctgctgcctgaggatctcggtgagaacgtcctcctgggctgtgagcgccgagagcagtgccggcctctgccttgtgtccacggagggtcctgtgtggatctgtggactcatttccgttgcgactgtgcccggccccatagaggtcccacgtgcgctgatggtgaggaataagccaggtgggaaggcagcacctgagatctgcctccctcagcctgcaggcctcacacctggcaccttctctccctgcagagattcctgctgccacctttggcttgggaggcgccccaagctctgcctcctttctgctccaagagctgccaggtcccaacctcacagtgtctttccttctccgcactcgggagtccgctggcctgttgctccagtttgccaatgactccgcagctggcctaacagtattcctgagtgagggtcggatccgggctgaggtgccgggcagtcctgctgtagtgctccctgggcgctgggatgatgggctccgtcacctggtgatgctcagcttcgggcctgaccagctgcaggacctggggcagcacgtgcacgtgggtgggaggctccttgctgccgacagccagccctggggtgggcccttccgaggctgcctccaggacctgcgactcgatggctgccacctccccttctttcctctgccactggataactcaagccagcccagcgagctcggcggcaggcagtcctggaacctcactgcgggctgcgtctccgaggacatgtgcagtgtaagtgtctggtggcggtggtggtggtggggtggggagtccttttcccaggatctgtcctgtgtcaccggggcttagtgtgtccttttgctgatgaggaaactgaggctcaggaggtgaagtgacctgcccagggtcccactacaggagggtggcagggcagatttacatctgtctcttcagcccagctgctcctaccctctggcggtccccgtgtctccccgagctagtcctggtgtgagagagacaccctgaccgagatagagagctgcctgagcctttctgcaggagctacttggggagcgggacacgcttttgatcatgaacagaattccaccaaccctggagttagaacagcttgggcatgaattctggttcctctctttactggctgggtgactcaggcaagtggctttgcatcactgagcctcagttttctcatctgtaaaatggggatcttagcgacttcctctcccctcgtttgtgaggagatactgtgtctgtagtaggtgctcagcgaagaagcactgcaatgccagttatggtgggtgatgctcactgcagtcctgagccaacccctgccctgcctctcccacagcctgacccctgtttcaatggtgggacttgcctcgtcacctggaatgacttccactgtacctgccctgccaatttcacggggcctacgtgtgcccagcagctgtggtgtcccggccagccctgtctcccacctgccacgtgtgaggaggtccctgatggctttgtgtgtgagtgtgtgtcctgggcagctcccgtgctgggtgctggacacctaagctggttagatcccatctgcactctcagggcttgtaggatactggtggaccaggcatgccaagccctagggcagtgtggcggggccaccgcatgtagagggacagagtttctggagaaggtgagcctgtactgggcttcagggccagactctgagagccacagggggaaggatattttatggagtggcatagcatgtgccaagtccctgaggtctgcaaggacagtggaagtgcaagggggtgagcaggaatggggtgggaaagttggtaggggctttgaggacacccagctaggcggctctgactttatcccaaggacagtggggagcctctggagggttttaaacaggagaggggcatgaccagatctgcattttacaaagatgactggctgcagtgaagggcaagcctcggccatgaggtggggcagcttcacggagaagggaaggggccagattctgccaggagttgctgttgcctggcttgtgacctggagggtcgcctaggcatcacgccccaccccccagcactggccgggaactgctcctccatgggtaggaaatacattgggagtagaagtgagggtggtgggggcggctgcagtttccaggattagatgataggtgggtgcgtgtgccccaccccaagtaagtggctgtctgccactcgctgggggaagtggggaggtggcatttctggagaaggctccgtgggctattccctgaggctccttctctccgcaggtgtggcggaggccacgttccgcgagggtccccccgccgcgttcagcgggcacaacgcgtcgtcagggcgcttgctcggcggcctgtcgctggcctttcgcacgcgcgactccgaggcctggctgctgcgtgccgcggcgggcgccctggaaggcgtgtggctggcggtgcgcaatggctcgctggcggggggcgtgcgcggaggccatggcctgcccggcgctgtgctgcccataccggggccgcgcgtggccgatggtgcctggcaccgcgtgcgtctggccatggagcgcccggcggccaccacctcgcgctggctgctgtggctggatggtgccgccaccccggtggcgctgcgcggcctggccagtgacctgggcttcctgcagggcccgggtgctgtgcgcatcctgctggctgagaacttcaccggctgcttgggccgcgtggcgctgggcggcctgcccctgcccttggcgcggccccggcccggcgcggcccctggcgcccgagagcacttcgcgtcttggcctgggacgccggccccgatcctcggctgccgcggcgcgcccgtgtgtgcgccctcgccctgtctgcacgacggtgcctgccgtgacctcttcgacgcctttgcctgcgcctgcggcccggggtgggaaggcccgcgctgcgaagcccacgtcgacccctgtcactccgccccctgcgcccgtggccgctgtcacacgcaccccgacggccgcttcgagtgccgctgcccgcctggcttcgggggcccgcgctgcaggtgggatggctgggcaggggggtgggctgcgaatgccccctggggctatggtggggcagagaagtctgccaggtctgtggatgagtcgcttcccttccctggtcctcatgtccttatctgtgacatgaggaggacagtttaatttgataaatttcctgataaaatacagatcaaaacacaaccagttagcctggaatttcagataaacagcgctgtggtctggggctgggagccgcctgccgcttacacggaggttcatccctattggtggctggttggggtggagggagggggtcaggctttggcgcttcccttattcatctggcagtggctctcccgggagcccagcgtgtggaaggggatctggctgtggcctgacccctccctctcccctcaaggaatgtccaggcgttgtgtttaggagctgcttttgttcagagtccttacactttgttgtcctgagtcctctgagactctggaaagcgagtgcaaccctgtgtcccttccctcccatcagggacctcaatcccatgcccaatagaggaaggccctgagttccatacatgagaacacaagctcaggtggcccacggtcacagcgctggggagggcaggtcccaggtgtcctgcacccactccagcctctgctctctccccaggttgcctgtcccatccaaggagtgcagcctgaatgtcacctgcctcgatggcagcccatgtgagggtggctctcccgctgccaactgcagctgcctggagggtcttgctggccagaggtgggtctgggggcctgggaactgtgaggaggtccaatgaatgtggagggctgttcctccagccagggtggggcgggggtcctcgcccaccttctcacccctccctggtatcacagtcaccattgtcacttgagtttccttccatgactcgcaagaccatcctctgtgatacagactgctgctgggcagtggttgcctggtggcagttctggaaacccagcctcagcccgcctgtgggagaccataaaagtgcagattctgggccctgcagacagtggcgtcagcgtctggggcacctgccttcacacaggctcccgtcaccctaatgggatgagagtccttctcagtgacggctgctcaggtggtcacctggcagggcccagctgggcaggagcagcgcatggggacagtggatggataagctctgatgcttgctgaagtggggatgggcagcagagcagctgggagcacaagaggcagccatgggggaagccgctttctcagcccccctccctctccaggtgtcaggtccccactctcccctgtgaagccaacccctgcttgaatgggggcacctgccgggcagctggaggggtgtctgaatgtatctgcaatgccagattctccggccagttctgtgaagtggcggtgagtgttgtcaggggtgaggggccgtggacgtggcctgctgggcccttggcgagatgctgctggggagagagcgcagcaccatggggctgttcctgggccactctgtcatggggtggggcagtgagaggagcctcaggtcccttccacaccccccacacaagaggtatttccactgcagggagagctttgggggctgtcaccgtctattgacaagagcacaaagctcctagctgggtcagcggcttcctcagagtgcccagggcagtggcagtgaggacagatggtctctgccaatccaaccaggactcagggccatgttggtgttctgggatttaggttggtgaatccaggagactcatctccaggggtttctgagccagtgtcctgagtaggaagacacggaggggcagggggcctgggagtccgcactggagcaggctcggcccgctgtgcaggctggccccaaccccgggtggctcagcccaggaggagcctggacagacgaaggcagcaggcgctggagctgtgaacctccccgccacaccccttcctggggcggggtggggggagtgggtgctggcgaggagaggcttggaagggaagtctggggagcagccttgatctctacaggcttctggcagcctgggtcataaaccacaaatcccctccgcttacggggaatgtttcctttcaagttgaacttttacagcctctggcttccctacccagccacctccccagggcagggggaggaaatggctttacagctcctccctcaaaatgtccaacggtggaggctggcaggaccctctcaggaccagaggaactttcctgtcaagttttaggacccaggtcacagtgggctgggaagcctggaggtacagagggaggctggtgagtcccagagcccatgcctctggaatcctcgcatcctgggactacagagtcccaggcatgtagaggctttgatggggaatcctgggagcctgtgactggagacaccagggaggtttgctgggctccccgaagcctgggccgaggctcgcagggacaagctgtcataacagcccctcggcccccctgccaccctgcccccgcaggtgggccccagtggattctgaccttgctattgtggcagggggccgctcagcctgcccctgctcctgctctgcctcatgagaccctcgtaggcttctgtgaaacccatgcaccctgcttagctcctgccgggtgttcaataaacgcccatctctgtccttctagccagaactcctttgttgtataggcctccccgagcagtggctgtgacaggtggtttcctggcacttgcctgcatacccctggggctgggtcttcactgctcccagggcagcctgctcccagctctgattttctctgagtaggtccttgtgctgcgctctctgctctctgagggccccggcgtcctccccttctctgcggtcttaggcctcggtgtcgtgtctcttgcagaagggcctgcccctgccgctgccattcccactgctggaggtggccgtacctgcagcctgtgcctgcctcctcctcctcctcctgggcctcctttcagggatcctggcagcccgaaagcgccgccagtctgagggcacctacagcccaagccagcaggaggtggctggggcccggctggagatggacagtgtcctcaaggtgccaccggaggagagactcatctaggccagcctggctgctggcaccagcacctggaggtcctgaatggtttctacctggagacccaaggaagctgcttccagggctcgggacattgctacggaagtgtccccttggctggcagcctctgcctctgcctctgccccatcctggatggaggacgaggggagcaactcagggaaacagaggcctagagaggctgcggacttctccatcccaccctcggggttccgccttggcaggtgtacggctgtgcgtgggagggcacacgtgggttcacagtgtgttcaggagtgtgtgtatctggaggagtgtgtgtgtgagtgtgtacctgggcctgtgttagtctgcagatgctagtgtgagtgtgtcctgacatggctccagggcgtgtctgccgtgtttactgtgtgtctatgactgtgatgggtgtagctgatcccaggaggtggcggctgcgccatggggtcaaccattacagtcctagggcaggggcggcccaaggctgcatgttctccaggaggccaggccggggttgcccaggcacctccttccccgcctctgggggctgctcctgctgtggaggcagctgggaagtcagggaaggccactagcagaggctgagtgggcttctggctcctagaacaaatgtcccttcaggcaggtctgtctgccagaagccagagccagtcatgcgagggaaccacagacccacccgccccctcagccggagcagcccgagggagcagaggaggggctgcctggagcttcccaccctgctgtggtcatttgtcaaagggggaaggcacccactgcctacctcacagggctgttgtgaggatcagagaggacgacagtggggaaagaatctggaagtcttcaactgccgtctgatgggaaggaccgtctgggtgtccttctgggatgaggatgacagagcaacccttctcctgccctgaacccccccagctcacctgaccacctctggttctccagctccggtccttcctagcagcctggtgagctcactccttcccctgatgactggctgcctctacacagactcggcgagaggacttgaaggaagccctctgggttgtctgctgagtacaggggctcagtgaacactggcgctgcctctgagtcggggctgggcctgcagaggccgactcagaggagactctgctgcttgctcccagccccttccccggcgatgcccatcacactgtgacctcccatccctgaagggcacctgcctgagggcctggcctccttccagcttcatggacctggagatgtgccctttcatccttcctgcttcccaggccagtagatccgtttacacttttgggtcgacagtcagcttttccttttggttttggcgggtcccagaggcatgggtgtccagtccaatgtggggagccacgtgacaacgtgggggactgggacatgggactgggaagtcagcagacgctgggatagagagggccctgaacaccaggctcaggggcttgcttggtccttatcctgtaggaggtgggaccacctttccctgaactttctctacaacccttgggagcgtggggaggaggcggctggttccagggtcagtttactaagttagagatttggaaaacctgtgtcagctgtaactcctaggatattttatgtggaacctaacatgcagatgaaagctggctgtcccctgtcctcttcctggctcctgtgggttcgggtgcctgttttttgtttttttttttttttttttttttttttgagatggagtctagttctgtcacccaggctggagtgcagtggcgagatctcggctcactgcaacctccgcctcccaggttcaagcaattccctgcctcagcctctggagtagctgggattacaggtgcctgcttttagtagagacggggcttcaccatcttggccaggctggtcttgaactcctgaccgacctcgtgatccacctgccccggcctcccaaaatgttgggattataggtgtgggatgacaggtgtgagccaccgcgcccggcccgcgtgcctgtcgttttcagcctgtcagtcagtcagtcctgcaagtgggggcatggtcagatgatgggcgagtcggagggggtgggtggtgtgactgggcatgttccacgctcactatggggtggtcgattggtctgcattcccccgcccgcctccccgcaaacaccagcgtccaacagaggcagagtcccaggctctgttcttgctaatgagagacctgtgggggcgacttgccaggtgtccccttgaactctttcctggctcctgggtgccctcaacgtcgttggaggcctgcagtctgccccatggcccccgcagggctgagcaggcctgttgccagcccaaccccgtgcctggtctgtgaggggcagagcatgagctggcttagagccctgagtgggcaccggcttgggagggtgcggggagttgactccttccctaactgctctgcgcctggcccctgcctctacaggagcaggtggtgaggatggctccgggcccgtgtggggcctccccgacccaaaagcttcaaggacacggggatgccagcctcttccccaagatgattttattgaatgcacacaaagttcatccttgggtttgcaaaaagtcccacaagtgaagaggcagcagtgctcatgtgaacatggagcgctcaccccagcccctcagcacagccagggggccttggggtacacaccctccttccctggggccgccagcacctcctctgccctatcccggatggggcctgggggtctgcccagggtgcgaaactggaatctatgctgaaacacctaagtgcccaggaggtgcccccatggcccaggagtgacacggctcccccagcagccagagcccattcctgagccagacaggtcacggttgacccaggaagagccatgtgccaggatggccgccaagcctcactgagcatgtgcagcagtggcagcctctcagacatagagggggctccctgggtgacatctccagagacccccttgtcccccagacacccctgggtagactgtgtctgacccttcacaaataggaaatgagagctcgggtcgaaatgctcacaatttcctgcgtgtctcagatggttgttttcttaaatggtcgggccatactttaacttggtttatggaa

SEQ ID NO: 131 - DNA, 92529 bp, Homo sapiens
  source 1..92529: mol_type = genomic DNA
ttgtctcctaggctagagtgcaatggcgccatctcagctcactgcaacctctgcctctcaggttcgagcgattctcctgcctcagcctcccaagtagctgggactacaggcatgcaccaccatgcccggctaatttttgtatttttagtagagacagtgtcaccatgttggccgggatggtttcgaactcctgatctcaggtgatccgcccgcctcaaactcccacagtgctgggattacaggtgtgagccaccgcgcccggccagtctgcattattctgtatctgcatttgagccgcaccaaaatcttaggcaagccttccctgtttgagtccacgtcacgcaggcagccttccatagtccttgttccacccattccccatccttgtttctcccacgtgccctagctcgtgggggccccagactctgagatcccggaggtgtcttgtttgtgcctgctgtatagcacagggcccggcacagagcgactcgatgggtatttggggaatgagttaatgctggaggagctaattccggtgtcttggtgcggagatgagcagtgcggacaggccccctcctgcccttgggccccagcaccttaccgcgcagtgcctgcatacccgtccacattttgtgactgaggcgggagcacggggcagtcccttagctcttaaggaacgtggatttacctgtttcaaaggtgatttcgtctggctctaaattgatttccgtatgtacctgcacaggttaaaaatgctaaatgcctccgggcaaaagagatatgaacatgctgcactgctcctagctacgggacttggggcacgctcttctccaagcctcagctactggatctgtgaaatgaggtgatttccacctccctggattcctgggaacgcgtcctagggtcgttgaaggtaaagtgcggagcctggatccccgcgctagcggccccatccggaaacaagtctccctttcttcgtctgcaaattgggaagagggggcctaagttttctgagcacgtgtagagggtgggagtcacctcagtaactgtgtactctgcaccgcgccacagttcacagcgcccagcccttgcggatttcatttgctaaaatcctgggaggtcgcctccttattcctattttccagttgagctgcagagagctggggtttggtaaatttgcaagccccttgtgggaagcgcttggcaccgcgccaggcgcatagtaagcgctcaatgaaaactatgcttgtgtggccagtggcgagggagctgagcgtctccttgtccctagccggccctggaggccagcggccccgccttcctcgcccacccggcgcccgcgcctcagctgccccccgcctccttcagcccgctgagcctgcggggcggggccgggggcggggccggtgatgctcggtcctaccagcgccgccagcgatctgggggcgtggcctccgggctccggggagcctacaagaggcggtacgctgagccccggcacccactcgcatcccagggcgtctccggctgctcctattgagctgtctgctcgctgtgcccgctgtgcctgctgtgcccgcgctgtcgccgctgctaccgcgtctgctggacgcgggagacgccagcgagctggtgattggagccctgcggaggtaagtgtgatttccatgcttctcccttttgcaaactgttacccccccgagaagctggaataactaggacagatgccacctcgcagggctgactgtgtgctggcaccacaccgagtgctctgcttgcatagcggaacacagctttgcgacatgcccttttgcagatggagaaactgaggctcagcgaggacaactcatttgtccaggacctcgcagccaggactccaaggacccaggattcaacgccgatctgagcgcagaatcctgctccttagaggctgtttactctcttgccttcctcgtgcagttcactagcatttgttgcattcctgtgttcgtagtgggtgtcaataactggaaagctgatggcatggatatggcaggcattagaatgtgtcctactcatgtctggaggaccagggtgatctagtggcatgtgcattcagctgcagtttagagggccacgcccctctgtgatttcatttgcaaggtagccttcttcccacatttcagatgaagatgctgagggtcagagaggtgaagtaagttgtccgggcagagccagggctggaacccagctctgtctgtctccagagcttcaaatggatgtgtagagacttggggccatgtcagggttctgcagtctgggggaacacgtttctgggtttctttagccagagcgggcacctgcataactcctgcgtggggagagttaccctggaagcggagggctcactctggagtgtgggggagatcggtcgtcccacgtggacagagccagggctagtccctcatgtgctgcagacccagagcctcccttgctaaggctgggctggtggacaagccagggaggacttcgctgatgcctgctcatcgcagtccaacttgaattgggcgtctctcagccaaaatgtgagttgctgccctggctgagagaagcatcccgtgcaaatgcctagcttgccttgcaaccgagagtggggttgtgagtttcccctttgggcctttggacctcttgccctggtagaatggggtgagcctgctttccccatccagggtctgatgtctgacagtgaggagagcctgcagaacaggaccggggcgtggtcctttccagtagactgaggccatgagttgtgactgtcggctgtcccagggctccttgggttgtatgcacctgattttctgcttctgcccctgatctggctgttcccactcaggagaaggggtgggtgtgtgactgtgttgcctgtgcggcaggcacgcggtctgtgccacgcagtttacctgtattgtcatcgctgcaacaccccggggagtaggcctcttgatgcccacttcacagctgaggaaactgaggctcagcaaggtgaagtgcttgcctaagatcccccagctggtatggaatgctgtcacccccaggtgggtcctatctgcactcttgaccctgctttctttaagacacttccctgcccactgccaactccacccatgaacctgaccttcacacaggtgatgttttgtcttacaggggctccagttaaaaccactggacaatgtacccagggaggagaaaccaagagggtgattttgattttttcagagtttcttaagatgtgagagtaggaatagtaataatgccatttgtaataatacaagcagctgacatttacatgatgcttagtacagaccagacatgcccagggtttccacggatgagctcactgcctgctctattagctgggcactttttacaaggagttagttgaggctcagaattattaaggtgtgtgcccaacatgacacagccagggcggggtagagctgccgtccaggctgggccctgccccagattctgggggaaggtgcccatctaatgaccagccacatgactgtcccagcagagcttgctgctagttgaggctttctgtgccatgtgggagtttttttaacgttggcagggatctgggtccctggtccctgttggggtgaggctgggaggggatcaactgaccctgggcttgggctcaacattgctgacaggtactgagagccccgtcccaggacccaaatcagtgctggttctgagtcctgcctctgtcctggagaggagagttggtttgactgggaaggcctgagctagggaagaagactgcgaggtctcttaaaacctctgcacttcatccctcaaaagaccacaaattaagtatgtggccctttgtaagttgcatttgaaagtttttggaggcaggaccctctgacgtctttggaggtcagaaagtttttggaggcagggcactgacctctttggcctgtgggaactggaacttttctttcctctgtcaccagcgtcatttgctgtgtgtgggaggtgtctgcatgtctgcctgcgccagactcaggaggctttttctttctttttcttttttcttcttttgcaaacgcactggtttttgatcagtcccagatgtgcaaacccaggatcactcaaacgggctgacggcttgtcaggaaaggaaaattcaatctgggcatatttcacttcgtcttcagttcattgagtggaacagatgctcagaccttccagggacagggacctaaagcacgttgtaaagtcttaaatagagcacgctgagttctgggacaggcaagggacaggtagatctgggtggtggttaataggatgggccatgttctgtttttctttttcctgaaaagatgtattgtggtaaaaatacacataaacataaaatttaccatttaacccattttgaagtgtacaattcagtggcgtttagtacattggaagtattgtgcagccaccaccactaattccagagcgtttcatcatctcgtaaggaaaccccaggcccattaggcatcattcgccattctcctcccttcagccgctcatctcctttctgtctctacgaacttgcttattctggacatttcatgtaaatggaaccacacaatgtgtggccttttgtgtctggctcctctcactcagcatcatgttttcaaggttcatccatgttgtaatgtgtatgagaccttcgttccttttttatggctgagtaatattccattgcattaatagaccacgttttgtttattcattcttccactgaaggaaatctgggctgtttccacctttggcttttacagaggcttctgctgtgaacatttgtgtacaaggttttttgagggcggatgttttcatatctcttgagtgtttacctgggagggaattgctgggtcatatggtaactttatgtttaacttattgaggagactgtggcctcttttttgagttccttcttgaagcatcaactcaggtcatgtcattccagaatgtgttgctggccttctccatgggtgcagggaagccctggcatttggcatttgtgggcagtgttggcgtgccacctgggtcacagcagcagcaggcagggaatcctgagacatcgccctgggggagccctgccttctaccccaggctgtacaatgacgagtactcttggacaaagacccctcttgcaaggctgcgaggacatcatggtccagcccgagggagatttatctttgattgtcttgagtgctgcatcagctaagacaaaaaccacagagtcagagggaaaaaaaacgtcctgatgaggattgtgcaatttccggaccatcattttttaaaaattataaattatgaaatcccacattttcaatcccaatttctggaacgtgttttattttgagcacagaatggcaacatcccaggaaaaaaagtcatgctcccattttgcttgtaatcaagtgagctggaactgaccctaccccaaatattttttgaatagggaaaagactcaactggacccctctaaggactgggagctggcatggagctggcatcttctgagactgacttgagaagagcctgataacgcctagaggaaacaggcagggttttgcgagcaggggaagatgatagtgggtgggtggggagctggcgagggtgccccaggcagaggcaccgtgtgtgtgcaaaggcctgcaggtggagaagggcctgggactcttggagaatggcaggaagtttggtgtgcctgtagtctacgagccaggctcagggcagcaaaggtctgtcctgcaggtgttgtgatgagctgtaccacttagtgggcaccatcaagatgaacagagagtaacacggtggcactgagaacttgagaacagctcactctagaatgaactgtgtcctccaaagtgtgcagagccaatacctaggggtccccaaggtgactgagcacgggcacagatccagcagcaaatccccccagtccaagagctgttctttccattctctgttctttccattctctgttcttccggtccttctgcttatggcaaggtgaaagtcacaggtggaattgtccctatcacctctcccacaccctgatctccttttacaacaaagagcaagcatcctctacaacaaagcctttggttggtgtcagtgcctggctgggaggaagtaactgttgtttttactgtgtttaatttcactcctgccgtctgttcacggcaccagtgatcaggttctctgccagtgggagtgatagaaagttacctttttaaagtaaatttcttggaacgcaaaaaacaagccaagttaaataaaaatacaaaatatggggccaggcgcggtggctcatgcctgtcatcccagcactttgggaggctgagacggtggatcacctgaggtcaggagtttgagaccagcctgaccaacaaggtgaaaccccatctctactaaaaatacaaaaattagccgggcgtggtggcaggcacctgtagtcccagctactcgggaggctgagacagaagaattgcttgaacccgggaggcggaggttgcagtgagccgagatcacgccaccactgcactccagcctgggtgacggagcgagatgccatttcaaaacaaaaacaaaatatgtactggtaccagtacacagtaggaaggtgggcaaaacttgggaagggggatattcaaaggacagggtttgggaaatgctggatcaaggtcggggaagaaggagaactgagaggctgttataatttagagaagtgcttctcagagtgggggccagcagccaggcgccgtggctcatgcctgtaaccttaacactttgggaggtctaggcgggaggattgcctgagcccaggagttcgagtccagcttgtgcaacatagtgagatgctgtctctacaaaaaatttaaaaattagctggtgtcctctcagtgtgtcttgtcctctccatgtttctaaaataaaggaagaaaggcccagcgcagtggcgtacacctatagtctcagcactttgggaggccaaggtgggcagatcacttgaggtcaggagttcgagaccagcctggctaacatggcaaaaccttgtttctactggaaatacaaaaattagctaggcgtggtggtgcacgcctgtaatcccagctacttgggaggctgagggaggagaaccgcttgagcctgggaggcagaggctgcagtgagccaagatcacacactgcactccagcctgggtgacagagcgagactccatctcaaataaataaataaataaataaaaataaatacataaatacataaaataaaagaagaaaaaaaattagccagccgtggtagggcacacctgtaattccagcttcttgggaggtagaagacttgagcccaggaggctgaggctgcagtgagcagtgttcacgccacggcactccaacctgaacaacagagtgagaccctgtctcaaaaaaaaaaaagtgggttcctggcctggaagcacctgaggactcatagaaatgcaggttttcaggcttccctggagacctggatcagaagctgtggggtggggctggcagtctgttgtaacaaagcatcctgttatcctagaaagctaaagaaggcttgccctggggccctggcacaaaggtggggcatggagggctggctactggggtcagcgtggagctgtgtggacggttctggttatagggcctggtgtgaccagaaagaagtcacgagtgacctgggagctgaaagaccacctccctccaaaatcaggaaggccccttaagaacaagttgttggcatatttggaaggctttcttccagaagaacactcagccctttggcactttgtgctgaagctgtgacgccctgatgctccagggcctgagtcagtgtcctgaggatgctggcaccctccttcagagcacgtttcatgcccctatgtgcctgggaagagccagctacgcacatttacttataacccctgaaggggtgagctgtttcctcaagggcattgaagacacctctatgatgtgtgtccatcttccctgccatctctccctcctgccccaggcctgctgcccacacagccagtccgttcgccccgggagggaagacacggtttattccccgggacctgcgaggctggggctgccctgggactgagaaggtattttcagctgggccttggcatcgcaggacaaagtgctctctcagacttgggatgaactgggccctgtctaggagagtcgtgtgcgggtccaagggggaggccccaccgccagctggactttatctggggcctgacacatcgcagttcactttgaaggctgctgagccggggccccaggcctgtttcagctctgagactcctgagggaaaggccccgggattttctcttgcataatggtgtgctctctccttggaccactcctgccctcttaatccagtcttcaaacagaggtcagagcaacatcaaattttttttttttataatttcttgttgatgcttaacataccagggaagagggcacagccgtctctgtaccggcagagagattttcacaaagcgccgtagccccggtcacagcagagcctggccggcccccagaagccccccaggcccctctcactgcccccgcaccccccaaggtagtcatttccggacttctaagggcacaggctgggtttgcctggtttggacttgacttaaatgaaaccatgcgtgttgaatccccggagtctggccccttctgttggttgagcaccgtgtctgcggggtttgtctgtgctgttgtgtgttgcaaggcttttgcgacacaaaccagaccctgtcaccgcccgacttccctccctcgagggccctctttgcatttagagcaaaaccaagagtcctcaccgtggccttcaaggctgctcaccacctggccctggctgcctcctgaccccattcctccccagcttcatgggcttttcgcctgtcctcggtcacggtcacgcctcgactgtgaccccttctgagcctttgtccttgcccttcctgctgcctgcagtgccctttctttttttttttttttttcttttttctgagaaggagtctcactctgttgctcaggctggactgcagtggtgcgatctcagctctttgcaaccttcacctcccggattcaagcgattctcttgcctcagcctcccaagtagctgggactacaggcatgtgccaccacgcccagctaattcttgtatttttagtagagacagggtttcaccatgttggccaggctggtctcgaactcctgacctcaggtgatctgcccttctcagcctcccaaagtgctgggattacaggtgcgagccgccgcaccgggcctacagtgccctttctttaagagctcagcaggaccttgccgtctaccccaaccagagtggttctgcccccctcctctgttcatcttcgccatccgtgtgtccgggatgtcctgctcacaccttcggtatttacctgtccgctgcccgtttgtttactctctgtctcctcccagtcccgagggcagattcggtctttttcacttgcagatcccaaggactcctgggattttcacctgcagagtgctatggaggttccgcagccagctctcgactcatcttcgcggatgccacctgtcagtgaatcacgcttctcaggcagggagactggcccgggctgccagccctggagcccagcacagagatgacctggggccctgaatttactcaggaggagaagggaaagaaacatcattaaacaccattaagttcctgggattctgtcactgggccctttataaacatgatcctgggtagtcatagcacccttcctcccctagccatggaagaaactcagggcctcatgcatgagtgaggaattagaggcttgaggaagttgaggcatgcccagctccatgcagtggcggcagaattcgaacccagagctgcccattcttctctatgcctttcctcattgccttctgggagtccgtaattcctttcccttcggagagggagggctcctgctgtttatcttttaaagctttgctgggaacattgtttccagggaaacaaccacacgtcttcaagaagggagaaaggtgccccaggagttatgtcctggggttttaaagaatgtattaatttattacctggtcccttaaaagtgacttttcttatatatcaccttggcttgcatcgaatgcacctgcttttcagttctttttttttcacatagtgcattaaataagagtttgttgaatgactattttctttttgtccagaattttgtatatgcttagcatagtatgtaaacaatgaaaagcattgtatagattttttgctcaattaagcatccagacatattgactcagaaatcccataagaatatatcttttgttaattagctggacgtggtggtgcgtgcctgtagtcccagctactcgggaggctaaggcagaagaatcgcttaaacccaggaggcagaggttccagtgagctgagatcttaccactgcactccatcctggggacagaacaagactccgtctcaaaaaggaaaaaaaaaaagaatattatcttttgttgaggtgacaggaggagagaaggtgccttgtggggctggtgtcgcctttaagctgagtggactgttggctgtcctggggagatggggaattcagcacagtgcaggcagcagctagggaaggagctggagctggactgtggcctcccttgggtctggcttcaatcctgccaagaagggtttaaggaaaactgccaggctgcagtgagtaggggagaaagggcccccactcactgcgtggtgcttacccaggcgctctaacgggatgttctgctcagtcaagggatctgccagagacacaaacggggggagtggagtacccctccttccagccactgcttcattcctggaatttctgggtggtttgtgggtatgactctgatctgcccttggcctcttgctcagatctgagttctcctttgatacttgtgaggaagggtagagcctagagaacaccccgacccccaggcttctggggtcagctgctctcctgtggaccatgggtctcagctgagtggtgcagggccacaggtcagaactgccctgatgtttaagagagtcgctgcgtggacgacccaggactggtaagtgaccagggcgtagtgaatgaatcgacattgtcctcaggccttatgtgtgaccacaggcaagttgcttatcttttttaagcctcagtttcatcgtctgtaaaatagggctattgtcacagtggcctcatcagtttgtggaccacatgaaatgttcagtgcaggagtagagggcccaggccacgcctgcggcagccccttcctcatcccacgttggcgtgggtttggtgatgaacatttgctgggggcataaagttgattgaacaaggctcagtgctggccaatggtgaactgcagccagcttggactggctcataccagctcttgagagctgatagttacattttcagggccagcgtagtggctcacacctgtaatcccaacactttgggaggctgaggtgggaggatcacttaagctcgggagttcgagggtggcctgggcaacatagtgaaaccccttttctactataaatacaaaattagctgtgcctggtgttgcacacctgtagtcccagcaacttgggaggctgaggtgggaggatcatttgagcctgggaggttgaggctgcagtgagacatgattgcaccactgcactctagcctgggtaatagtgagaccctgcctcaaaacaaataaataaataaaattcagtaaaaaatggattgcgaaccagttcaacacaaccagcattaaacgttagattataaaaacttacagttaagttatattccgggcatggtggctcacgcctgtaatcttggcactttgggaggccgaggcgggtggattgcctgaggtcaggagttcaagaccagcctgaccaatatgggaaaccctgtctctactaaaaatacaaaaattagccaggcgtggtggcatgcacctctagtcccagctactccggaggttgagacaggagaattgcttgaacccaggcggtggaggttgcagtgagctgagatcatgctattgcactctagcctcagcctgggctacagagtgagactctgtcttaaaaaaaaaaaaaagtcatatttaaaaagaaggtaataaatacttaaaacctatcacttttgacttttttcctgcattttactgtggcctctgctcttgagattatcagtgtctatgggatctgcgtgatggaaaggctgcgtgaccgtgtgcttctggggatctctttccagaaactccatgctcggtgacttcacactggttgcttgaagttggccatggtgggagtatttacaccaagggaattggcaaacaccgcaaggcaggctggtttttgcttggtttttgttttggaagctggtggtgaacgatttaccatcccaccactgttccggcccttgagaagctcggggtccagggagggaggctgagagtcagagcggctgcaatcctgggtggggagcccagggccgggggtgcccatgggcctgtcaactcagctgagacgcagccatggaagaggacagagctccatgacagaaaatgacatctgacaggataacctcggtgtgaatcaccaaatacatttgcatgggtggcacctggccaggtggtgacatgaatcccccagacctggcacatgacatcttggacatctggggaaaaatggccaatgctcaaggtatatacagagctaatatacgtttcaaattcagtagagggtccccctgccatcccccaagcattggacatttaacagattttttttccttttttcttttgagatagagtcgcccaggctggaaagcagtagcacgatctacagtctgcatctcccaggctcaagcgatcctcccgtctcagcccctccacgagtagctgggactacaggcatgtggcaccgtgcttggctaatttttttattattattatttttagtagagacaggagctcaccatgtttcccaggctggtctcaaactcctgagctcaagcgatcctcccagctcaacatcccaaagtgctgggattatagatgtgagtcaccgcacctggcctaataggatttttattttttttaatttttaaattttcaaattttttattttttgagtcttgccgtgtcacccaggcgggagtgcagaggcacgatctcggctcactgcaacctccacctcccagattcaagtgattttcctgcctcagcctcctgagtagctggaactacagacacgcaccaccacacctggctaaggtttgtacttttagtaaagatggggtttcaccacattggccaggctgctcttgatctcctgacctcaggtgatccacccaccttggcctcccaacgttctgggattgcaggcgtgagccgccatgtccagccggatttttaaacattggattttgttaaggtaaacgtgggctttgaaataatatgaagagagaattgtctgttcatagcattccacattattcactccagccttctaaaatcccttcaaacgatgcatttttggaggctctggcacagcctccttattataacaggcagtgcactgactggggactgaagttcaggacctttttccttcctcacagccgtagggcctgtcactcccctccacccacagacgtgaactcaagaagctcggtgctgtgtccaagatgacacaggcttgggcaaggccaagggccagtgaggggcaaggtcaagaattgaacccaggtctctcttccccgacagcccatgctgcagtcagtaaagaagcagcccaaatcagacgtagtccttatatggcttttctgatctagctgggagcaggagggggccacagagtcatcccgtaaatatttatcaaacactgacttagacatcgacgcttcggcggtgaacgagacccgcaggtctgcggtgtgattacactggaggtttctaggaagccgtgctcctcgggctgagtcttagcaatgagcaggaattcatctccctggcctgggccagtgaagcggggcatgtcggggtcatgggatgagctgtgggaacagcatgtgcaaaagcagggagcttggcacaggctgggagctgacggctgacaggctaagtcccgagattcatctttctggcagattctcctaaacacaaggcacttgcagcccaggccaatgacgcaatgagcttcagcccagctccttctccctcactcacttctgagtgttgagtacgatggcgcccaagagataaccatcagggagacccctcgctaaacttggacacatggtttggtgatcccctaaatgtccacaaagcctcggccagggtagaggggtgcggttggagagctcatagtgcaaacaagctgtgttgaaagtcctccaaacttttggcaagtttgagttcaagtcttggtttcactttaaactagccacacagtctcctaaatgccagtctcctggactcagttgcactttctgtaaaatggggctgaaaacagctgcctccctgctagagtccaaatgcatctcaaagctctgggcagcgcgggagaagtgtggctcccgtcgctttgattcgccagctgtgggtctcaccattgaccctgggacctgaaagctctgtccgttcccctcccagcctctgctgtgtgctgaaatctggtgtgttttcatgaggtctcggagccgttatcttacttgtggtcttatgggctcagttttgcaactctggcaaaagagaacaaaatcttctagagagcatttctgctgtgttgtcccgcggtccctagtgatatttcattatcaatgagtggctgagtggacaggatgcaggggcatctctctaggagtggcgcatgcacccggccctgcctgggagcatcaggggtagaagagcagagttagagtgggagcctcacaccctgggtaccgaagtgcactcggggcagccaccaaagcgtgagctcttccaggacgctaggagggcactctgcagggggcatccatctgccagaggtcagaggtcagagatcagctcatcatatctgggtcaaaggcgagtgggcagcaccgatggtggtgggggggcgtgtttgtgttggtggaacgtcaccatgatgcgagggtctccgtcgtctcccatgggggtgacacgttggtgccttctcatcaacagaggcaccacgtgacccgggaggcccgtgccctgactcccccagcccagcagccttcccaggaggcagaagagggtggaagagaactttagggcaagattcggttgtttggtttgggagcccccttccccctgcatgggttggtgggggtgcttgggattttcacatccagagggaagcccactccgtgggaggcagcagggcactaagccaagggcatacctgggcctcgaggttagaagagctgcgttccggctccagacttgctgctcgccctgggcaggttccttaaattccatggacttcagcctcctcatctgtagagtgggagtgatggagcccagactctggaaagtcaggagggtgagaggagatcacggaggtcaggcgctcacaccacgacgggcgcagggcaggtcttccccggcggcccccttcgccctgagggttgctggcgtgagccccttcttgatgttggcaagcccgggaccacttggaggtccatcccatttggaaagagtttgtgtgttttcattgtcaatggaaaaggggtggaagtgcttcggtcccggttccgactgagctgtctcagaagtgagggtagaatgggcagtgtgggccagggctgccgggcactgcccctgtgaactgggcctcggccaattggtttgtggctttggcagatggcaccaaccaggttccagccaggaccctggcctggcctcctaacgtgcctgtctgcctccttcgtgtctcctctttacaatagccaggggcatatttggaaacagtcctgtccagccatgtgttatctgatgtgtgttggtctgttaagccggctacagcaaagtaccacaagcttcaacaataggaatttagattcccacagttctggaggccagaagtctaagatcaaggtgctggcggggctggtttcttctggggtctctctctgtggctggcagacggcgtcttctccctgtgtcctcatgtggtcgtcctctgcgtgtctcggtcctaaactcttctagtaaggacaccagtcagcttggttagggcccaacctcatggcctcacattaccttaatcacctccgcaaaggccccgtctccaaatacattgcatttggaggtcctggacattagggctccagtgtgtgagtttggggaaaaccagctcaaacccatagctgtgtgcttgttcctgtgcacccagcactgggctctgggggtacaaactggaatgaggtgctggcccttttatggttacttttctttttttaatttttttgaggtgaagttttgctcttgtctcccaggctagagtgcaatggcatgatctcggctcactgcaacctccacctcccaggttcaagcaattctcctgcctcggcctgccaagtagctgggattacaggcaggcgccaccacgcccaactgattttgtatttttagtagagacggggtttctccgtgttggccaggctggtgtcgaacttctcaggtgatccacctgcctcggcctcccaaagtgctgggattacaggtgtgggccaccatgcccggcctatggttacttttctgctcaaaatctgctgtgttctcctgcggcccaaatgtagtaggagccatccagatctggaggagcctcatcccctcccaagcagggaccctccgacccacccccaggccctctgggctgaagtcaaacccaaccactttcagacccaacagtactggcacaccacccagcatggcaggcctgtgtctcccaggctggtggcttttgtggtgcacatgagggcacttggagaaaccctcccattcctctccccttttccttctgttgtcttccaatgtggaggtttcactaaaccccgtggttctcccaactctaaagctccacctgagacttcataacttctctttggaatccttagagaaggaccagcctctaagctgtggaagtccctttaacattcagaacaaaggcggccagtcagatctcctgggatagctcacgctggctcaggaggacgtgccagaggactcatttaaaaacagcatttgactcctcctgttttctcactttggcattttgttttattttgttaagcacaggttggccctccctgatctgacaatccaaaatccgaaatgcttcaaaatccaaaactttttgagcactgccctgaagccacgtgtggaaaattccacacctgacctcatgtgatgggttgcagtcaaaacatagtgaaaactttgttccatgcacaaaattattttaacatgttggatgaaattaccttcaggctacatgtataaggtgtatctcaaacatcaacaaattttgtgtttagattgggtcttatccccaagatatctcattatgtacatgcaaatcagcggagcatcgtcatgacaccaggaggacaccccgtgacgccgattaccgcactctcaacctcaacccagcgtcagagttttctggcatctcttctttgagcctggccgcctgcagctggaaatgctcatatatggtggtgtgactaacctgagagagagagatcagggatcctgagaagttctgcattcttggtctgcttcccagtgggacgagtaagcacgcagaggtcctccccacgcagccccgggctcggctttggaggagggcagcccgtctgccctgctacaaagcaagccaagcctctcctctccgcatggggttatttttgtctgaggcgcaggctcagtcaggaccctggagagtttccaggggtcgggaatgggaaccacagcattcccatagctctttggctcagcctctgtcgcctgttgccaacgtttctgcttcctgggatgcccgtcttggcctctatcccctccaggccttgatctacatctccccaccccggccccacccgaggatgcccaccttgcactgccactgtcccagccaacttgactggtaaacacctggttggtgctatgggggtgaagaccagggaggactcatgtgaagaactgagccccgtggagttccgacgggtcagcctgaggcacggccaccacccaaccctccagacagagctgcttcttccggccctcgagggcctggcactgtctttagagtcagccttgtcctgctatgtggggactgcgggtttcctcctccatctccccgacctaactgagctccttgaggccagggacagagtcctcttcatcttcgcatccccagtctccatctcggagtccagcacaaaataaggcgcttgatggaggtgactgggtggccccgactctcccctgcgaggaaagcagagaggaggggtgtgcgtggacgcactcgttcaagcccttccttgtcttcttgggccaatgacatacatttttcagatggcaagccaggaggaggaggtctgtggttcgtgaccctataatggaggggaggtagttggcccccagggacagaggagtcaaggtagcttgctggaaaactctgggtctttgtaatcatcatttcgaatttcagcatctctgcttaccaggaggccggccctgggcttgtcttgtcaccacactaagccatagcttgctttttttttttttttttctgagacggagtctcgctctgtcgcccaggctagtgtgcagtggcgcaatctcggctcactgcaagctccgcctcccgggttcacgccattctcccgcctcagcctcccaagtagctgggactacaggcgcgtgacaccacgcccgggtaattttttgtattttttagtagagacagggtttcatcgtgttagccaggatggtctcgatctcctgaccttgtgatccgcccgcctcggcctcccaaagtgctgggattacaggcgtgagccaccgcccccggccagccacaggtttcttatctgtaaaatggggatgagaacagcctgacctcctgggttgccatggtgattgagaataacataaacgaccggcctgtgtaggtgctgatgaagggttttctgagggaacaaaaggctgaggccttggctggacgtggttctgggcagctgtgtcttagtgtgcaacagatgtgcgggtggggcccggggcgagggccgtgataagaggagccatatgtcaaccactattggtaaactgagtctgacttcacagggactagaagtttgctctcaacgttggtccacggagcatcctttggtgatgggaaatgactttagcaatccccttggggcaggtgatagaagctaatttgtgcctgagattcacctgagtcctgaatgaataagagatgctgactcataattagaaaatgcagggactcgctcaaggaaaacttgagtccaggaagaactgttctaggttatcctctttggaatcctgacagcttgcctcgctggaaacccttggcgtaaatcccagctccaccacttcctgtctgtgggaccttgcttgtttagcttctgtgggcctcagtttccgcatctgtaaaatggagagagtcgtgtgtgctgcgttcgctgctccagccagcgctgtgaccggctcctactaatgcgacttctcccaccaccctctgcttcctttcagagctcaagcgcccagctctgcccgaggagcccaggctgccccgtgagtcccatagttgctgcaggagtggagccatgagctgcgtcctgggtggtgtcatccccttggggctgctgttcctggtctgcggatcccaaggctacctcctgcccaacgtcactctcttagaggagctgctcagcaaataccagcacaacgagtctcactcccgggtccgcagagccatccccagggaggacaaggaggagatcctcatgctgcacaacaagcttcggggccaggtgcagcctcaggcctccaacatggagtacatggtgagcgccggctccggccgcagaggctggcaccgggggtggggcctgggccaccagcctgctctgttccccagccagctctgttccccagccagtgcgtgtgatggctggctcagggtctcctctggcaggggaggatcccggctctgttctgttttgtttgtttgttttgagacagggtctcactctgccactgacgctggagtgcaatggcacaatcgtcatgccctgaaaccttagactcccggggttaagcgatcctgcttcagcctcccaagtagctggaactacaggcatgcaccatggtgcccagctagattttaaatattttgtggagatgggggtcttgctacgttgcccaggctggtcttgaactcctaggctcaagcaatcctcctgcctcagcctctcaaagtgctaggattataggcatgagtcaccctgtctggctctggctctgttcttaacattctgccaaaacaacacacgtgggttccctgtgcagagcctgcctcgttgccttcatgtcactcttggtagctccactgggaacacagctctcagcctttcccacctggaggcagagtggggaggggcccagggctgggctttgctgatgctgatctcagctgtgccacacgctagctgcaccaccctgacttctccttagcccgtgtgagcctcactttccacttggagagtccttcctcgcgtggttgccatgactgtgagataagtcgaggctgtgaagggcccggcacagactgaccctgcctccccaacccctaggctttgctaaccgggaaaggagctaacggtgacagaagacagccaaggtcaaccctcccgggtgattgtgatgggtgttccaggtgtggttgggcgatgctgctacttgaccccaagctccagtgtggaaacttccttcctggctggttttccagaactacagaggaatggaccacagtcttccagggtccctcctcgtccaccaaccgggagcctccaccttggccatccgtcagctatgaatggctttttaaacaaacccacgtcccagcctgggtaacatggtaaagccccgtctctacaaaaaaatccaagttagccgggcatggtggtgcgcacctgtagtcccagctgcagtgggactgaggtggaggtggaggtggggggtgggagctgaggaaggaggatcgcttgagcctgggaagtcaaggctgcagtgagctgagattgcaccactgcactccagcctgggtgacagagcaagaccctgtctcaaaaaaaaaaaaaaaatccacatctcccccagagtctgagtctttgccactttgtgggtacaggcatcatcatgtctttggaatgcacccatggccccctgctgtgattgctctgagagacacgctgccgtctcatctgtgtctttaaagctgtggtcacgttcctttgccacaggctgagctggcctgggtgatgacccgtgtctcccccacaaagctgccatggagggtcgtggcatgagggttgagtggctattacgtgccacgtgaattgtgtcctctttaatcctgacagtaatcctggaaaatagaaagtattagcaccaatttgcagaagagaaaactgaggctcagagaggttcatctttaaaggacttgtacaaaccacacagctacaaatgtacaaatggtgaagctgggattcaaagccaccctgtctgtccccaaaacctgcacatagaaggtgctaatacgtatttattgtttctgtttgtttgtttgtttttgagacagagtgttgccctgtcgtccaggctggggtgcaatggtgccatctcggctcactgcaacctctggctcctgggttcaagcaattctcctgactctgcctcctgagtagctgggattacaggcttgcaccaccacgccaggctaattttttgtatttttattagagacggggtttcaccatgtttgtatttttattagagacgggatttcaccatgttggccaggctggtcacaaactcctgacctcaagtgatccacccacctcagcctccgacagtgctgggattacaggcatgaaccaccgtgcccggcctatacatatttattgaatgtgtgggtaggaggctctgcttctctgccttccacatacctgatatttaatcaactggtgaattctatgtatttttgagtgcctcccgtgtgcccagcaccccgtgagattcttgctataaagaggtggacaaagcagatgaggtccccgtccacacggcacctccggactagtgtagccaggaagtatttgtggagcaccttcgatgtgccaggcactgtcctggattcccggaagaggcatgattatgagttgtgcagagttagatgaagaaatacggggagctgcaagaaagaacgttaggggtggaagaatcctgactgagagggaggagtaagggtggcccactctgcggaggagccatctcagttaagacctgaagagtgagcatggttgagcaagcaagcgtgcagggaagggtgttctgggcagagggaacagaaggtgtgaaagccaccaccgcctcgtgagtctctttccttaacgggagaaaagcttcgggtctcagaggagctctcaaaaagccagcagggccatggctcatttctgagggagtgaggccattggaagaggtcagagaggcaggcaggggcaaatcacacagggctttgaggctaggtgaggagcctgcctttttttctatgaggaatagagttttggtattgctgaaatgggggtaaaaaagaaaaaaaaagaaacagggtttttttgcgggagaggatgcatttatgactgtgaagcactttttttttttgagacagagtctcgctctgtcccccaggctggagtgcagtggcgtgatctcggctcactgcaacccccgacccctgggttcaagcgattctcctgtctcggcctcccaagtagttgggattataggtgcccaccaccatggccagctaatttttgtatttttagtagagacggtgtttgccatgttggccaggctggtctcaaattcctggcctcaggtgatccacccacttcagcctcccaaagtgctgggattacaggagtgagccactgcgcctggctgtgaaacacttttgctgctgtgcggtgttggggattggagggcgcagcaggaagcagggaggcggctcaggtgacgggcaggtgaggagtgacggggcggtatttgggcgggaggcggggagtgaagaacaaagagccgttccggagacctgggaggcattgcccatgggtcagggctacactggttttctggctgggctttctgtctttctccaagctctggacacaccgcaccgtgagaaaggctcctggaagcagagcaaccctgcccgggggctgtttctgaaggggcagagcagaggctggaaaacctgcaagccttccctcagagtcactgcgttccctcgtgccacgctcccctcctcttccaagtcagttagcctccctccctccctccctccccgcctgcctgcctgcccgccctccgtccctccctccctccctccttctttccttccttctttccttcctttctttctttcttattgttttttttttgagacagattctagcactgtcgcctaggctggagtgcagtggtgctatctcggctcactgcaacctccacttcccggttcaagcgactctcctgcctcagcctcctgagtagctggaacgacaggtgcgcaccagcacacccggctaatttttgtatttctggtagaggcggggtttcaccacgttggccaggctggtcttgaattcctgacctcaggtgatccgcccacctcagcctcccaaagtgctgggattacaggcatgaaccactgtgcccaacctacgtttttctttttcgccgccaatttctgagagcagagggggcttgttggaacatgctgttgggagagttgctttatgagaaatgaaaggaaaggggccatgggaacgttgagacccattgaatccgcgcatccctggtggcttggccttggtcctcatggggcagggaggccccacgtctctctggagaggttgtcagcatctgggactggagcttgactgagctgcgacccccaggatcccagatgcttcccgcctcccggtctggagcaggctgggttcatgctggtcttcttgtccctgcactgtgtggtcctcccggtttcatgcaagacttagtgccagtgaaaggagcttctttgcagcagggaaagtcaggccgcccgggcagcccagagcaggcctttcatgttttcctgtttgtttacttggtgatgtttcaggattggagctgggatctgggtcctttggtctaaaaggccggcctgctggggaggctgagccttcatggatgctactgaggctacctcggagcaaggaggctgaaaggatggggtggcaggggccctgccactcagcccggcaccctcagcactgcgctgcattgcccctctgctctggttcacacccaaacaagcaatgcagatttgagaaagcggcttggaaacgtggcttcctgctcaaccctgcctgctgtggcttcaagccacagtcctttgaaacagccttagcactgaaaggtggattctaaaaccccaaagagttgagcagcccgttctgaggttttatgagtggacaggctctggagccagcctgcctccgtccagccagctctgtcactggccagctttgtgacttcgggcagattgcttagcctttctgtttatatttcctcacctgcatgatgggaacaagaaaccctttctcatagggttgtttggaggaggcaatgagataatgcataaatcagttccaagtaaatgtgaatgatgctgttatcatttagtatattgcacagtcagcatgttgcattagcatattttagtaacttatgattttcgtgggatgggtctggcacttggttacagtatgcaaggcaggaagagcccccttagtagccagacaagagggggttgtgaaagacttcctggttgtgtgacctcaggcatgctacttaacctctccaagactcaaggtttgttgccccttggctgttgaggagtcttgctgggacacggggagagagggaagtgaggcatgcggttgtgttgggcaggtactccctgctggggggtcccagggctaagacaggactgtcttccctgagcatctgctgtgtgcccggggctgggtgtgcagagggcaggaggccagcctctgcctgcttaaagctggagcatctgtcgggaggactccagggaggaagtgcagcgtcagctgccagctgtgccagggctgcctggcatctgttcctccacagaggagaaaggacacgcttgctctgttcatggaattctctccccaggagtcatgtgtgttcctggggccagcctgtcttcagagtctctgcccagacccctgctcaggccccactgattcaggatgggccgtgctgggaggtgagcagggctgggcaagctgaagacgtctcttgtcaatttcttctcattgtggtaaagtatacggactataaaattgaccattgtaaccatttttaagtgtgcagttctgtggcattaggtacattcacactgttgtgcaaccatccccgccatccatctctggcactttcttttcttttcttttctttcttttttttttgagacagagtcttactttgtccaggcccggctaatttttgtatctttagtagagacggggtttcactatgttgggcaggcgggtctccaactcctgacctcaagtgatctgcccgcctcagcctcgcaaagttctgggattacaggcgtgagccactgctccgggcccatctccggcactttctatcttccaactgaaatgcggcatccattcatctcggggcccttcttgctgtgttgccctgcgggtggccagtgagagtctaaaatcccctgcaggggccctcgtctgcttttctttgcaggcctgtgtgtcgctgacgtggataaagcctccctgactgcagccaggccctgggctgggcatcttgtaggcttcccctccccattactgctcacagtgagggccatggacatacccacattacagatgaggacagtgaggctcagagagggtaactgcgtgcctaggttcacactgccattccaggaccagcattcagagcgccaatccaacgccacccggataattgatttctagcccctggcctaggaatagcatctgattattacctgctgtggtccacacataactgcgtacatggagacagctcagggtccaaggtcctgaagacctgggttcagatcctggttctgtgactggctgtgggacccagggaaaatggcattgcttcttcaagccttggtttgcttgcctgtgaaatggagataagggcccgcttcggagccccctgttagaatgcaatgaaaaggttggggtaaagcccgaggcctggtgtgcctggaacatgcgtagtaaggagaggaagcctggtgtgcctggatcatgcgtagtaaggagaggaagcctggtgtgcctggaacatgcataaggagaggagactggggtcatcgggacaggcttccaggccaagaccgtccctagagatggctgctgaccttcccttgtcttccacacagcgtgccgtgttaccctcagaggtcactcagcatggccactcctgtttcacagacactgaggcccagagagaaggcacctgcccaggacctctggcaagttagaggcccagcaggaggcctgaggataggcttggagccggcacgtctggcctgccacgcccccctggctgatttaggaacccagcaatacagcagcagagcattggctgtaggctccacaggagcccaggctggggcgttgctgtatttatggttcttatgcccctccctcaccctcacctcctggtgcccgtttctccttctcctgcagacctgggatgacgaactggagaagtctgctgcagcgtgggccagtcagtgcatctgggagcacgggcccaccagtctgctggtgtccatcgggcagaacctgggcgctcactggggcaggtaagagccacaagttcctctccggctgccgcaggaccccactgccgtgtgccgggctcagcacttgtgccccttatcaagtttagcctgcaaagagagtgagagagaccacccgtcccatcgatattctgggaaactgaggcttggcatccaggaacactcctgagtgactgacaaaatgtattcaagcttggttggctgaccccagacactgatgattgattaaagtttgtagtttgggttttccttcttcctttccttcttcctttccttcttcctttccttccttccttcctccctcccttcctccctccttcccttccctcccttcccctcccctcccctccccttcccttccttcttttcttgacagggtcttattctgtcatccaggatggagtgcagtggcgcaatctcggctcactgcaacctctgtctcctgggttcaagtgattctcgagcctcagcctcccaagtagctgggactataggcatgtgccaccacgcctggctaatttttgtattttttggtagagacagggtttcaccatattggccagggtggtctcgaactcctggcctcaagtgatccacccacgttggcctcctcaagtgcggggattacaggcatgagccaccgcgcctggcctgtagtttggggtttccattccatctcctgtgcagggttcttgagtccccgttcctgtggggtgaactgctctgttcatggtgggtcatttctgtctggttctgctcactgtttaaggctgagccaggttccaccctgttgggaagatgcccattgccttccccgcgtcatccagccgtcgggaagctcactaacttctccagacccccgaggcttccctgtctggcagtgttctgtcccctctccttccctgtctgggagcgatttgtcccctctcccataggaggcattgacggttgtctgttaaatgcagccgacgggccttccccagagtaagctggaccatgtatccgtgctcccaaagaacccagaagtcccctcctgggggctgacggctggtttcattggagaaagtggaaaaatgtcttttgaccacgcccaggataacaactaagaccacataagacttaacgaccaacctgtgaccgtgccatgcccaaggccagaattcacgtcctcagacccatccaggacctggattgacatccattttgccctaattattgaaaagttggaatgggctttagacagcctcttaaaatgtaggtgagcgtttgctttcacttcccacagagggatttcctagcttgggtttcactgggccacgggcagccgcaccttcctctgcatccgtgggttttcaggacaaacctgggcaggtgtcatggtggatcgaccgcggtgacttcacagaggcaaatccacaccatggttttttctttggtgaagttagctttttataaaaactatcttacaggctgggcaaggtggctcatgcctgtaatcccagcactttgggaggccaaggtgggcagaatacaaggtcaggagttcaagactatcctggccaacatagtgaaaccccgtctctactaaaaatacaaaaaattagccaggcgtggtggcaggcgcctgtcatcccagctacttgggaggctgaggcaggagaatcgcttgaaccctggaggcggaggctgcagtgagccaggattgcaccattgtactccagcctgggtgacagtgcaagaattcgtctcaaaaaaaaaaaaaaatcttacaataacatgaaagtgaagtgtctaaagcagggagatctggaattccactagcctggttcggctcttttcatttttctgagctcctttgcagcacctggctgggcgccgacgtagttttacagcattgagactgtagcctggatcactttgaaatctttttctttttccttttcatacaatatcaggaaattttcagtgatacagttgtcatgaatgtcgccctgcaaatgccctaatgatccctctgtggacagaccaaagttgacccgttggctcttgcagattcatttttgttttttgtttttgtctttgtctcacttgaatgatttcattaggattactcctgagaagtaggattgctgggccaaagggcacacagacttccccctttcttaaggaattttgctaacttgctttgcaaaagagcccctgactctgcatggccccccggggcagccgcgggttcctttccccacagccatgccagtgccagccttgagtctgcgtgaccttgagccgcagggaagcggatgagtggccagcagccctctgctcctgcctcctcactgtgtgcacgcctttctgcaaatgccgctgcccgctgccgtgcgctccgcttccagacagtaattgttacaagacctctaactgcctcgacgaccacatggcccttaaaaatggtcatttcccccgtgagcattttctcttcatcgaaaccactttgtttatacttgctggtgacagtgtgactgtggacttgcctccagtttggttttctccctagttattaaaaaaaaaaaaaatggtgccaaccttggcagccaaggctgaagcaagggggtggtgggcatgaagcgatgaccccacggaggatgtccagggacaggtgcagctggtggctgcagattacaggcatgcaccacctcgcccggctaatttttgtatttttagtagagacggggtttcgccatgtcggccaggctggtctccaactcctgacctcaggtgatcctaccgcctcagcctcccaaagtgctgggatgacaggcatgagccaccatgttcggccttaagtgcactcacgtcttcatcaggttttgtcttagacaacaatatctgtgaaatacgggcttcatgggctggatagtttttctccaacgtacctgaaaataaacacctaattgacataagaaaggactcattacttgggaggctgaggcaggagaatggcgtgaacccgggaggcggagcttgcagtgagccgagatcccgccactgcactccagcctgggcgacagagcgagactccgtctcaaaaaaaaaaaaaaaaaagaaaggactcattaagagccaggtgaagagattcctgcacgtgcaggtggtgtatgagccacctgaggagcctactagagaccccaggtgagctcctcaaggataatggtattaagcacctgtaccaggtgctgctggaattgagggttattcccccacctcggcctccctccctcctcgctgcccgtggctgctcctggaattgggggctattccgcctcctcggcctccctccctcccggctgcccgtggctgctcctggaattggccgctattcaccctcctcggcctccctccctcctacctgcccgtggctgctgctgtctccactggtgggtgaggggaggggctgggactgagtgagcggtttctgccctgcaggtatcgctctccggggttccatgtgcagtcctggtatgacgaggtgaaggactacacctacccctacccgagcgagtgcaacccctggtgtccagagaggtgctcggggcccatgtgcacgcactacacacaggtaactcggggacttgccacgacctcagccctgccccccaatcccagtcattcaccccctgcccctgggggattgtcaaatctgtaaagcctctgcgctgttgttgccttcatttttaaaaattcagttctatacagagtacagctgggagaagaagctgtttgttaccagcaaggtcagaaactgagtgagcactacaaactcttttttttctttgaggcagtgtctccctgctacctgggctggagtgcagtggcatgatcttagttagcttagtgcagccccaaactcctgggctcaagcaatcctcccacctcagcctcctgagtacctgggactacagttgtgcactacgaggcctggctaatttttgtatttttttttttttttttagagatgggtctggctatgttgtccaggctagtcgcaaactcctgggctcatgcaatcctccccgctcagcttcccaaagtgttgggattacagttgtgagctactgcactcaaccgagaaaacttctatggcaatttgacattgtggggcattttcattgtgtgggagtctgtttgtttgcttgctttttttttttttgaaacggagtctccctctgtcgcccaggctggagtgcagtggcacgatcttggctcaccgcaacctctgcctcctgggttcaagcgattcgcctgcctcagcctcctgagtagctgggactataggtgcctgccaccacgcccggctaatttttgtttttttagtagagatggggtttcaccatgttggtcaggctggtctcaaactcctgacctcatgatccgcccacctcagcctcccaaaatgctgagatgacaggcgtgagccaccgcaccggcccacttgctttgctttttaagaaaatgtatgtatcttcaatgggttagggactaatatctgcttccccaacccttcacctcgtacctctttagtgccagcaccttatacatccaggccaaatgatatcacccttttgtgccttatccctcgagctgtgacacacaaatgtcatcttttcagatagtttgggccaccaccaacaagatcggttgtgctgtgaacacctgccggaagatgactgtctggggagaagtttgggagaacgcggtctactttgtctgcaattattctccaaagtaagacaagttgatgccgttgtatggggtgggggttgggatgtgtttgcttgccagggagcacccagtgaaaactggcttgagcagcgaagtctttaatatctcacataacaaagaatctagagtttagtgcatctgggttagcgtaatagctaagcagtgtcaacaaggactcgggttctttccgtcttcctgccgtaccattctctcctcatggtcccaagatggctgcacagcaccaacatcacatctccccaagcacaaggaaggatggtcaaagggctctctccttaggtcttttgcacactggcatactttctccttatgttctttgccagaattagaccaatcatagatgagggggaaaaagattgccccaactggctttgcaagacgtcctctgggaccaactgaacaaagtcagaagtgggaatagctgctggctgggcaaccagcatggtctgccctggcagtatgattatttttctctgaaaacatgcagtagacagcaccctagaaaacacatgttcacacaaagcctagcttctctgtttccctccaaagagggtccacatgcggcctcctgatcatggtgcctcctccgcctatagcatgctcagctcatcagtgtggtgtccagcccttgactcatttgctcatgggacaaatatgtgctgattcttggagagtcactcccccagttcatggcctgaggtttgcatgctggccgctggccaccgccgttcttgccccgtgccctgtgtagagtgggccccggggcatgtttgctcagtgactgaatgaaatgggaatgacctcatttatttgttttgggtcaggagtagttatgaaaaggtgggatgaagggggaatcgctgaggttgggaggaaaaatagaagccctctcaaaaccatctggtgtgcctgcggtggcgtggcgcggctcagcagcccacatggatgagcgcagcgggtgtgtcattgcctgggagggacgcaggcaccatgcaagagcagcagactggtccaaggtggtggaattcctggcccagtggcaggtggtgaatgaggaatcatttgacttgactctataaaaaatagacactagaaggtcctatcagaaatgaaattatttccttctgtagctgccccctgcttccttaaaagaaggaataacctccatatggtaaaatatactcatctgaagtatacagtgcgacacagtctcacatgcattagtctgttggggctgcaacaacagaggccacagcctgggcagcttacacatcagacttttatgtctcaccattctggaggctagaagtcccctggaccaaggggtggcagatcaaggtgtggcagatcaaggggtggcagcatcgggctccagtgggagctctcttcctggctcaccaacggccactatcttacatggtggtgagagatgaggacatcaatcctattgggtcaggacttcacctgttgacgtcgtttaaccttaattagtttcatcaaggccctgtctccaagtacagtcacattgtgggtgagggtttcaacactgggatttggggagacacataatgaaagtccacggcaatagccctctacccgtgtaactaccatccagatggagatggacagtgtctcccatgccccagaggctctctcgtgccctacaaagtgcccaccattctagcatctttcccatcggtctgtggtgtctggtgtgggacctcatatgaagggggccacacagcacactccctgtacccccaaatggtgttttgctcaacatcacattggtgaggtctccccgtggtgttgcgtgatcaccggttctttccttttgtctgctgcatattactgcgtgctgtccatggcctctgtcttagagagagggcttgagcccctgggctatgcaggacactgtcccaggcaccagggtgaggagggtggctgggagggtgagtttgggtgtggggggggtcagatcccttgagggggattcccaacccgacaaggggtggggtgggtgtgtacacagagggccttgtgtgtgagggaaggtacttcacggtgctattcaaaaattaaggagactggccagtgcggtggctcatgcctgtaatcccagcctcctttggccgaggcaggagaatcgcttgagtccaggagttcaagaccagccttggcaactggcaaaaccccatctccacgaaaaatacaaaaagttagctgggtgtggtggtgcatgcctgtattcccagttacttgtgaggctgaggtgggaggattgcttgagcccaggaggttgaggctgcagtgagctgtggtcacaccactgcactccagcctgggtgacagagcaagaccctgtctcaaaaattaaggagattatttgtctgcaggacctggtgcccagccagccttccaccaatgccaaccctgagtgttagggttgagctgggagcgtcagtggtgtggtttgtctgaggaaatatagaaccgtagacacaaggggaaacttggcaggggcagtgggacgtacccacgacagggccacgatcatctgagaaacctactgggcttcacccagagacaggatgggctctgggacctctcggtcccttggtgatgttctttttgggggagtcatcccgaagacccccggggatctgaacagacgatttctgagcagggatgtcttgtggcatggcacggacgcgatcattctgcctccggaatgtgagagggtggaagaggctgtgtgcacgtcataacagtgcccagtcagacagtggccagccctgtcctccccacactgcacggcccactgtccctcccctgcccacaggcccctcggtgaggccagggtgcttctggggccgcgggaagttctaggccactcttgtaaggacggatgcctatcagacccagagcgtgtttcctgccgtttgtctttggccagcactggcagggcccctccccatcttccctggaaagcatcagagcgttccccgcacaagcctgtggatttccccaacgctcagagcacagccttccccgtgagtcaggtgccggtccaagggcttccccacggtcactccctcagtctcacagcagccctgctgccgtgatcccattttacagaaagggagaccgaggctggggctggaggaggctggccgagggcacatgctggcagcctggggcccaagccggggagcctgctcttcacagcccaggagccgcaggaagggcctggggattccgctcaccacctctacctggcccctggagaaagcctatggtgcggcctccagttttcctgcccctgggaactccggagggaggcagagggcaactgtgacccaagagggacctttgatccagcccctagagtagagtgtgcctaaggctctgagccggacagcctgtgttcaaatcccagccccgccacttgcttgtcctgtgacctggggcaagtcacttaacctcactgtgccacagtttcctcctctgcaaaaatattgaattccagctcttccctcctggggtgttggggagatggggtgaggagtgcagtgaaggcacagaccagggatggtgtgtggtaaaaactgggaaacgcaagccgtctctgggacaggctggctttacacatttgagaaatggcttaaaagggggtcctggcagcttttcagcgctaaggtgttgtgatctaggggccctaacagtgttcagagctgtgttggtggaaggggggccacggggctgacagccagccagggcaaaggtactgtgtggaagggcatcttgtagctcccttctgcagaatcgctgggattctggagctctctagactctctgtgcacgggagaggcctgggatagccatctttcccgcttcccacagcacacaaccttcccccctgacctgtcagtggcggtgttcagggactcacgtgggccttggaagaggatcagtcccgaggcctcacgtcgtggttccctctgacggttgtttttgggtctgtcctcagggggaactggattggagaagccccctacaagaatggccggccctgctctgagtgcccacccagctatggaggcagctgcaggaacaacttgtgttaccgaggtaggaaatttactcccaacacttttgcaatgaatttgccctcagtctgagtcatgcgacagcgttacatgaaacaggggaattaaagaagtcagtcacccctcctggccctatttaagacgctctcagcacattcctcccgcctccgtgatgagctgagcctcatctccagggtctaggctcagcttccaggcccctggagagccccactgccccgagacatggcttcccatgggcatctcctgtgccgggctctgcagatgctggacacagcattaaatgcagacgcactgctcaccctcgttagcattcacagtttcatataaaataggccacgggctggacatcgtggctcacacctgtaatcccagcactttgggaggctgaggcaggaggaccatatgaggccatgtattagggttctctagagggacagaactaataggatatatataaatatgtatatatgagtttattaaggagtattaaactcacgtgatcacaagatcccacaataggccatctgcaagttgaggaacaagaaagccagtctgagtctggaggtggaacaacttcaagcccgatgtttgagggcaggaagcatccagcacgggagaaagatggaggctgctcccagtctccacctaagtcagtctagtcttttcacatttttctgcctgctttatatcctagctgcactggcagctgattagttggtgcccacccagattacgggtgggtctgcctctcccagcccactgactcaaatgttaatctcctttggcaacaccctcacagacacacccaggatcagtgctttgcatccttcactccaatcaagttgacactcagtattaactatcacaagtccaccccttgtcaacttgaacccatacacatctcctgagatcatacataatcttcaaataaagacaataataagatcataattacactaacataatacaaccatccttcgtaaaactggaaactcaccaatccccaacccaaatactatgacataaagttaacaatacttaaatgctgatatgaagttaataaatcttatgtcccatgatgaaggaaaaaggaaataacatgaagatattttcttagtacaagtgtatacatgcacaagcaagtttttaacaaaagaaggaggaaatactcataacaattacagtcctcatatctgcaactggtcacgtggttatagctggtattgatgactaccttcttctactgcccattctgtattccctttgccttcagcaagcacctcagcaggtcatggtttttttcctggtggagtgacccaaaccttcattcctaaagggtctggaccatttgtagtcctgcctggattaggctgttgtagtttcccattgaccttaatcacagggcatggtaatactaagagatgccctaagggagctcctgtattccacgcatactcttccttacctccactgtggagcggtagactgatttcatcttgatgatccatgtcactcaccccagccaacactgtaactcccttcttagcctgttgacttaaggggaggaggagcccaaagtgtccaggtggcaaccttaacttccagtttaatgggattgctgctatgtctcctggtggcagcgttcctccctctggaactaagacctctaggccagcagaatgtaatgtcacaggaacaggaagcaaaaattttgctagtgggtcactaggggtgagggtgagtgatgccatttccacttccaccccttaattcctgaactcgtgaatattggctatgggagaaacaatcccacatattggatgctgattgagggcatacatggccttctggagaactttgccccagccctgccaagtattgtcacctagttggcattgtaattgtgacttcaaaaggccattccactgttctatcaatccagctgcttcagaatgttggggaacatggtaaaaccagtgaattccatgagcatgagcccactgccacacttttttagccataaattgagtgccttggtcagaagccatgctgtgtggaatactatgacggtggatatggcattctgtgagtccacggatggtagtcttggcagaagcattgcacgcaaaatgggtaaacctgtatccagagtaagcatgtgttccagtgaggacaaacctctgcactttctgtgatggaagaggtccaatgtaattaacctgccaccaggtagctggctgatcaccccgaggaatggtgccatatcgagggctcagtgttggtctttgctgctggcaaattgggcactcagcagtggccatagccaggtcagccttggtgggtggaggtccatgttgctgagcccatgcataacctccactcctgccaacacggctactttgttcatgggcccattgggcgatgacagaggtgactgaggaaagagattgagtggtgtccacagaatgagtcgtcctatgtacttgactaataaatcctcctctgctgaggtcaccttttggtgagcattgacatgggatacaaacatcttcacagttcgtgaccactcagagagatccatccacatccctctttcccaaatttctctgtcgccaatttcccagtcatgcttcttccaagtccctgaccatccagccaaaccactggctacagcccatgaatcagtatataatcgcacatctggccatttctccttccatgcaaagtgtacagccaggtgcactgctcgaagtcctgcccactgggaagatttcccttcactgccatccctcaagcatgtcctagaaaggggctgtactgccgcagctgtccactatcaggtagtgcctgcgtatcatgcagaatcatctgtgaaccaggccctagtcttttttcatctgtcaactgatcatagggaactccccatgaggccattggtacaggctgggggaaagaaggcagggtggcagcagtggagaccatgggcagttgagccacttccttatgtaactaacttgtgctttcaggacttgcttgagctcaatcacacatatgccacttccatttgatgatggaatgctgctgtgcacgacccgctttatggctcgatgggtcagaaagcacccagttcatgatgggcagttcaggtcacatggtgacttgatgacccatagtcaaacgttcagtttccaccaaagcccagtaacaggccaagagctgtctctcaaaaggaaagtagttatctgcagaagatggcagggccttactccaaaatcctagaggcctctgctgtgattcacctatgggagcctgccagaggctccaaacagcatccctatctgccactgacacctcaagcaccattggatctgctgggtcgtatggcccaagtggtagagcagcttgcacagcaacctggacctgttgcagagccttctcctgttctggaccccactcaaaactggcagccttttgggtcgcttgataaatgagccagagtaacgcacccagatgaggaatgtgttgcctccagaatcctaattggcccactaggcgttgtgcctctttcttgattgtaggaggggccaaatgcagcaacttctccttcaccttagaaggaataccttaacaggcctaacaccactagacccctgtaaattttaccaaggtagaagtttcctgaattttagtcaaatttatttcccatcctctggcacacaaatgtctcaccaataagtccaacgtgtttgctacttcttgctcactggatccaatcagcaaaatgtcttcagtgcaatggagcagtgtgatatcttgcagaagcgaaagcaatcaagttctctctgaatcagattatgacacaaagctggagaattgatatacccctgagcttaggacaataaagatacattgctggcctttcagctgaaggcaaattacttctggtgggtcttacggacgtgaatggagaaaaaggcattttccaagtcagtggctgcataccaggtaccaggagatgcgttaatttgctcaagcaatgaaaccacatctggtgcagcaggtgcaattggagtcaccacttggttaagcttgcgataatccactgtcattctccaagatccatctatcttctgcacaggccaaatgggagagttgaacggggatgtgggaatcaccacccctgtgtctttcaagtccttgatggtggcactaatctctgcagtccctccagggatgcgatattgtttttgatttactatttttctaggtaggggcagctctaatggcttctgtttggcctttcccaccataatagccctcccttacctgtcagggagccaaagtgggggttctgccagctgctaagtatgtctatgccaattatgcattctgacactggggaagtgaccacaggatgaatctagggacccactgtaagccagacctgagctaaaactccattaattacctgacctccataagcctctactttaactggaggaccacagtgatgttttgggtcccctggagtcaacacctgctcagagccagtgtccagtagtccccaaaatgtctgatcatttccctttccccagtgcacggtttccctggtacaaggccagaggtctccccggggaagtatgggagaaagatgaacagcataaattgtcagtagcgtagtggggtccttcctcaaggggacctagcctccccttcattcaagggattctgggtctgtaaactggctcaaatctggaaattgatggagggaccgtgattctctgtttttataattcaaattagtcttttgtccactcaatctggaagttttctgcttatgtaaattaagtgggaatgtagtaggcttcctgtcaatttcacctctaggagcagcacaattaattagccaatgacaggactctacacgagccagactattctgattgctgctttgcctctgctgtccattacggtagctatgcccaccttacttttgatggttgagtgctgccacttggcccctgccaccttgggatctaatcattcccattgcatttaaattttgtagttgagtgactgtggttcccactgttagatctgacatacagaaaaaagcaattacaaagatgcaggtgctgcctttacaaatctatttcacaaagcattagtcaagggtatatcttctggattctcccagctggaatgagtaggtccaaaatgactaatccactctaccatcccaatctccctaagcctttggatccacattaaaccaagggagatgaggcatttccagttcactcacagtgggccaccttttaatccatatttcagctaaccaagcaaataaagcaaataaaaacagtgaagaaccttttttaactccctgagctgcaacattaaattaaatgcagaatccctatttagtgggcccaaatcaagaaattcagcctgattcaactctatgttccttccaccattatcctacacccttaatatccattcccatgactattctccagatttctgcttatatacatttgaaaattcaagcagttcttttcgagtgtagcatgtgtcacactccgaacctcacctctagcagcccgccaggactttagtctagttataggtctagaagcaaacagggatgttggggttggctcctgaggagaatcagcattatcttgcctggcagctgcctcaggcgcctcaggcagtgcagggtttatcccctcagacaaaggtggaaaggctgaccgcagcgtgggtcggggaggagacgttgccactactggggatggggaacctgtttcttctggcaaaaaaggtttatcagcatttacaagctcagtgtccctagcttcagcagggtcctcccacacttccccattcttttccaatcaatgccctcactttaataagtagacacctagcgaggtgtctgtgcatgcaccttcattgcaggtcagccacttgcatgagaagagcttgtgtctgtttttccacaatttcagctctttctctacaggagataagactcactcatgataatcttagcagatttgaggctcagtatctgcttctgaagccggaagttagaatccctgagttcatcattttctttcatcactttgtccggtgaacttagaagcaaccaatcagcttcattatgttccttggttctccacatatagtcagaggtattcagtctagagtcactgaactcccctctcaggagcgctgaatcaggagtgtcaaatgcatttattgtgcataactctccaaatagctcatgccaaggactcccagtgttctccatactattagaagtagagtccttagcattttgggatctaatcatattaagcagccaactccagaaaccctaaaaccaatgaaagaactccatccttaatattgtgttcctctagaaccactcctggtaccaaaatctgtattcgtcggggttctctagagcaacagaactaataggatatatatatataggggagtttattaaggagtgttaaactcacacaatcacaaggtcccacagtaggctgtctgcaagccgaggagcaaggaagccagtccgagtcccaaagctaaagaacttgaagtctgatgttcgagggcaggaagcatccagcatgggacaaagatgtaggttgagaggctaaggcagtctcgccttctcacatttttcttcctgctttatatcctagctgctatggcagctgattagatggtgcccaccaagacccagcccactgactcaaatgttaatctcctttggcagcaccttcacagacacacccaggatcaatactttgcattcttcaatccagtcaagctgacactcagtattaaccatcacaggccaggagttctagatcagcctggacaacatagcgagaacccatctctacaaaaaataaatagaaaattaaccaggtgtggtcacgtgcacctgtggtcctggctgtggcctgggaggcttagatgggaagatcgcttgagtccaggagtttgaggctgcagtaagccatgatggcgccactgcactccagcctgggcaacacagcgagaccccaactctaaaaacataaaacagacatttgaacaagaaagtaaaagcaaacaacgtgatattccaaatgagctcactagtgggaagtacctgcaatgtggacagctgggtaggatcagtcctcccgggctgtttgaccctttactcctgtgtccttgcccccattggcctcccctttatgcatgtgtcttgctggtgctcccctgactgtgctagaggtttctcgcccccactcccacagctctcagaactggagctgttggggcggtgcgattttctacctagttcaccttttttttgagtcatggcctccctttgttgcccaggctggagtgcagtggcgtaatcttggctcactgcagcctcaacctcccggcctcaagggatcctcccatctcagcctcccgagtagctgggactataggcacatgccaccatggttaattttaaaaattttttgtagagacgggatctcactatattgcccaggctggtctcaaactcccaagcaatcctccctccttggcctcccaaagagctgggattacaggcgtgcaccatcatgcccgcccaccatttcttcactggttcccatttaggatgtttccacttctgctactataaataacacaggtttctggtgcctaaagcgtttctcatgtcttgggatatttcctcaggctttcagaagttatgtccccgatggggcatggctggtccatggtgctgaccatgctcgtgtggcccaggcttttttttttttttttttttttaacgtggctccactggcagccttgccatgaccgaggggccttgcagagacttgggtgggctccgctggcagggaagggtggggtagatgtgggatcaggctggtgggttctggagtgaagaacaagtgggctagatcagtggtcccagaccctctgaggagccaggtcctctgttgtcccagccagctgttcatggctgactgcccgctggggagaggggacatcctaagtggggatggggatggaagaaggagcgatctggacactaagacagaccatgtatctgggtctgggtcatgtatcacctgttgcagtcttggtgtgacccccgcctccagggagccttcctggacttcacagccagacagtgcacctgccccatgttcatcaacccccagactccttgggaaccttgatcgtcctgtcgtctcagctgccagctcactccagggcctccggaggcacatggcaggggtgtcttatgtgttgtttgaataaatatgccaatagccacagaggggcattttcaaagaacaaatgtgcacagaaaccttagatgccagtttacctccaccaacatagcttcatgtacttatttttaaatttttggtagaaagtatccaactttccttggcagacacccaatttctctagctaagcacgcagcaagtctcctctgaagcagcttatctgcagaagctatttaccaagagcatatccagggtgcctggtaaggccttgacctctaacggagatggagcagggataaggatataaaaaaagaggtattctcccctctcacccccacctgtgtggtgatagaaggcgcaggctttggggaaaggtggtttgacacccagcccaggtacttcccagctgtgcgagcctgggcagggcccttaccctctctgagccttcttcctcatctgtgaaatgtggccaatcatgcctctgaaggcaaatgggaggttgacagaagaaaatgctggggatggccgggcgcggtggctcatgcctgtaatcccaacactttgggaggctgaggcgggcagatcaccgaggtcgggagtttgagaccagcctgaccaacatggagaaacccagtcactactaaaaatacacaattagccgggcatggtggcgcatgcctgtaatcccaggctgaggtaggagaatcgcttgaacccgggcggcggaggttgcagtgagccgagatcacaccattgcactccagcctgggcaacaagagcaaaacttcctctcaaaaaaaaaaaaaaaaaagaaagaaagagagagagaaaaaaaaagaaaagaaaagaaagaaaaatgcatgccggggagggcccagccagcatctggccagtgctcagtgaacattagctccgggcatggtcaccagctttagagccagaagggaatctgcagagtgacataaacaatgccctgagaccctggcccggagcagaatggggcacagaataaccttgccgtgacctctgcacggaatttccccaggcccgtgctgggccatacaaggtgtcttcattaggaggtactcggatccagcccatcctgcgggtaaagccttctacttttcatttgtgggtgtgagagccaggactgtctgtctgcccattttcttaaatagagagtcctcaaatgctttagaccgctttaccaaactgtcttcggctaaataaagctgcgattatgaggtctaaacatcctaaaggccagtggaagaaaacccggcttattctccagccagctcccgctctcagtgagggcaagcctgaatagcctcattgacgggaagaacagacacgcgcctgggcagcctctgcaaacccggtgtcttcctgaagcttccacccatagcttttgctaccagaggtgctttcagagttccctctttgaatgtctttaagctctgttgctggacatatgctcttttctttaggtgacaggattctctgggggttttggtagttcatgcatttgtgaattttgttgagcagctgctgtgtgctgggtgccaggtgtgaggcaggctggcccctggcctctggaggttcgcagctggtggatgaggcaggtggtggggaaatgacagttgcgagcaagctgctggggaacagtgcagggtgacccgtgagcacatccaagattagaattggagctcagaatggcttcccaccttctgacttaaacccgtcccttccccttgtgggacaggaccagcctggggtggtggttgtagggtagtgaaattggccagtgaagcagctatggagaaccccagcccaggaaggcgtcagggagtcaggcatttgcccctcgtttggctgtttggtattgtgtggacacaaaatacttgctgtgtcctttagcaaagaaagctcatgtattttaagaagtggagctaagacttagggattgaggaacacctgatgaaacttggatttttttttttttttttgagacagagtttcgctctgtcgcccaggctggagtgcagtggcacgatctccactcactgcaacctccacctcccaggttcaagcaattcttctgcctcagccccccaagtagctgggactacaggcacccgccatcatgcccagctaatttttgtatttttagtagagacagggtttcaccctcttggccaggctggtctcaaactcctgacctcatgcaatccacccgcctcggcttcccaaagtgctgggattacaggtatgagccaccacacctggccctgaaacttggattttaatccaaaaccacaaagagacctgcgagcgtgctctagttattctccttgaaattgttttcacccaaatacatctgttgccttttttgcttggggagcttggaggccacaggtttccaactctggtccaaagacttctgttggggcataggaggagcatgccataagtaaaggtattaagtgtccccagcagatatgctcgtgaatttgtctttgatcaggccgctcaggcaaatgaaaatagcagtgtctttgctttagctggaatttacaaattggtatcctggtggcctgattgcagattctggtgagcagtttgtagttgtctttcaggatgaaaactggaagataagctaactcaggtttattaagtgcaatgtgtttggttaattaaaatgttttaaaacatgggtcatggtcatagttggagaaataataatataccatgtccttgaataaggaaaagattgttctttcggatagttggatagttctacatgttgagtctgacattattggacagtaaaactccagtacagaagcaacaattgagctggttaagtgaccctgactggcaggaggagagaagggatggaagtgggctggtgtgaggtgcagttggggtctaggagcactgaggctggccttgtgcaccgtgatgtgtgcatgatgaggaagaccccttccccagtgaaaacccagggacaggggacttccagcaagtccactatggctttgggccagtggccgaggcagttttgttttttggtttttttttttgagatggagtttcgctcttgtcacacaggctggactgcaatggcacaatctcggctcactgcaacctccacctaccggcttcaagcgattctcctgcctcagcaccccccaagtagctgggatgacaggcgtccgccaccatgcccagctaatttttgtatttttagtagagacggggtttcgccatgttagccaggctggtgtcaaactcctgacctcaggtgatccgcccacctcagcctcccaaagtgctgggattacaggcatgagccaccgcacccggcctgaggcagcttcttgaagttgcttcgtgggggcagagggtcaggtggaggaggagatgggacaagaaaccattatgataacccaggtgtgggcgtggggcctgctaacctctgggcagcctggctgatcttgggtccaaagcaaacacagtgagcggagagcgtccccgtctcatctgggctggtagaattccacctggccaggtctgttctgaaatgtaactttctctttgccgctgaaatgattctttgtaaaaccaaacctcaaacacgtttagttttcaaattgcttttttttccccaaagtgcgtttttgttgaatcccagtgtgttattttttttcctccctctccaatgttaagaagaaacctacactccaaaacctgaaacggacgagatgaatgaggtggaaacggctcccattcctgaagaaaaccatgtttggctccaaccgagggtgatgagacccaccaagcccaagaaaacctctgcggtcaactacatgagtgagtctaggccgtcctccgcccctcctgccctcccagccacctccaaaggggacggggtgggtggaggaggggagctagtggatttaggtctgcaaatccacaggcagtggcaaacagggtgcggcgaagctcatggaggcacaaccataagacgtttttcaaaaacgatatttttaagtcatttcaaaagcgagcattataggacttgtgcttgggtggcattttccccacacccaggcaggtattttaaggttagaccttcccttgtcctttcaaaagggacctgggctgaagttgggttcctctgggaagcgctggccctgcagagggcaggcagcgtccagcctggctctggaaggttccactcctttctcaccaggtcctgggtctggactcagttggcgcatccatgaagtaggggatagagatgccacatcaaggttgcccggaggatgagctgcagcaacacgggtcacccagtgccagctgaggtctccctgtacattgagatcattgcagagttgcctacaactcttttttgagatggagtttcgctcttgtcacccaggttggagtccagtggcatgatctcggctcactgcaacctttgccttccgggttcaagcaattctcctgcctcagccccctgagtagctgggactacaggtgcccaccactatgcccagctaatttttgtatttttagtagagaaagggagatgtttccccctgggacttccaggaatccccaaaatattgactcttcccctgctcacctttggccttttggctccctgggcacctcagctccccaagcttttgttctgtctgccttcaccgccccagggtggagttcagctccccttcagctccccccagccactgctgcgggaactcatttgcagccgccgtttctgcaggccgggggctgtggaggggcgtttttgctcaggcggggctggagggctgggctggatgcccttggctctccccgtttgccccgcaagcctcaaaggccctaaaactggacccctctttgaggaacagcctcacacccgccttctcagagcccctctcttcttttcataactaccatctcccctgcccccaccagtctttctgtcctcttcaaacctctttccctgtgatgccgaagcattctgtagcttgctttgaccaggaaacctgcggaggcccttgtctgtccaggagttcaaaacggtgccattgtttcttttaataacatacaacgtttatgtcccttttcaaactataacacgactccgagactctgatatgttcccataaaataaacaaagcaaaaagctttgcaaaaggcatcttggcgatgggggagatgactcgggtgagcctggctgggtctccggccccacaggctcggagcagcatcctccctaccctctcaggagtcctgccctgcagagccctgtgggaccacaggcacatcgtgtgtgccaggcaccctgccaaggccagagttcactttctctctcaaggttcacaaaagcccttggaggtgggtactgtcactgtccgcattgtccatatgcggaaattgaacctcagagaggggaagcaaattgttcaaggtcacactgctactgtaaagcggtgggcctggggtctgagcccccagcggaagcctgcaaccatcaggcattgcccttgctcttagtatagcacggattggattgcagaatgttccagaatgtccctcagcatggggaagggtcttctcaccctcctggtttcgtgccgtgacatgtattcccgcatttctctcctagcccaagtcgtcagatgtgacaccaagatgaaggacaggtgcaaagggtccacgtgtaacaggtgagcctgtgctgggctgtcctgccactgtagcctctgagtctgtgctgggctgtcctaccactgtggcctctgggcctatgctgggctgtcctgctgttgcatatttagcaagctgctctcagcaggcagaacaggggttagggctgggcagtgtctgggcatgtgttcgcctcggccgttggcagatcctatgggaatgctgcaggatctgagcaggctgctcccagtgggccccaccagacagatgggccaccggtatattccccccatggtagatgaataaatccatctagttgttgcagtcattcagatgatgaacgctgtctgccaaaaagaacgcatttggttttggcagtgtgactgctgggctgttctttgtggtagtaaacagccaacaggtgcagccgccgcacgcacaccctcagagtcaaatgggaaaaccatgtcattgggagaggggaccttgctcgtcttcctacgaattctggcatcagtttgccgaaagctgaatcgagttatttaaagcacatgttaaaaagggaaggttgaatcttcggttttatatcgcaagggtttggaattcagtttgccaggagaacacttcacttagacgttggcaggactgtgatgagatggacttggagcagccgggatgaggcggctcagtgggctcacatgtggtactgtcgtttgttggtgagatgagcctcatgtgtcaacagtcagcagtggaataacagtgcctaaaacctcgcgctcagtgttagggtagcatttgcatgtctctgtgctgggcgaattgggaaaaagcaggcagcgcctggcaggggcctccgccgtgtgcactgccccgtctgggctgctgagaagccggagttgtccttttgtggcaacgcatctttctgaatgctaagcacattgcgatagcatcacccctgagtagtactcagtggaaaaaggtgagcacgtattggagaacattccttgtcagacaacatcgaggcagttccagagttggggtgggtggggcactccccatgcagggagaaggcaagaatctgtccacacaaaggctcttaaaggcctccagtcaagaaaagttactcagccccagtgtgccactgtgggagcatcctcattctctctgtagaagccggcccacagtctggcacacctgttttctgttcatggtgcttttacaaaaatagtagtcagtgggttttttttctgacttgaaaaggcatctatgctcattaataattattcaggaaagcaataacaacaacaaaaaagtagaaagaaaaaaatgtgttccaaaatctcatcaataccagcagcaatttgatgtatttccttccagtctttttttctgtgtacagatgaggctaatgctgcccatgtattttgttttttttttttctttgagttggagtcttgctctgtcacccaggctgaagtgcagcagcatgatctcggctcactgccacctctgcttcccgggtttaagtgattctcccacctcagcctcccgcgtagctggaactacaggcacacgccaccatgcccggctcatattttgtatttttggtagagatggggtttcaccaggccaggctggtctcaaactcctgacctcaagtgatctgcccgccttggcctcccaaagtgttgggattacaggcgtgagccactgcgcctaggctgcttatgtattttcacttagtattttccaaatattcttcacgcacttcatgcttagtgactgcctgatactctgacacacgactgtacatgaatgtgtttagccattgctttgccacctgctggcttatttccagcttttcaccattataaacagttgcggccaggtacggtggctcaagcctgtaatcccagcactttgggaggccgaggcgggtggatcacttaaggccaagagtttgagaccagcctgggcaactggcgaaaccctgtctctactagaaatacaaaaattagctggacatggtggcatatgcctatagtcccagctactcgggaggctgaggcacaagaatcgcttgaacctgggaggtggaggctgcaatgagccgaggtgtactggtgcactctggcctgggtgacagaatgagactctgtctcaaaaattaaaaaatgataaataaatagttgggatatgcttgcaggtctggctttcttgactttttgcttggaatatatatttacaagggaagctgaagagctaatggatatgaatgtttaagtctttcttaaagattttcttaaacattagagtgatttacacttccatgaacagcaacaccatcattgagttttaccctattaaaaaatccttgcaggccaggcatggtggcttgtgcctgtaacctcagcaccttgggaggtcaaggtgggtggattgcttgagcccaggagttcgaaaccagcctgggcaacatggcaaaacccccaaaattagttgggtgtggttgtgcacacctgtagtcccagctacttgggagactgaggtgggaggatcacctgagcccaggaagttgaggctacagtgagctgtgattgcgctgctgcactccagcctgcgtgatggagtcagactctttcttggggttttgtttgtttgtttgttggtttgttgagactgagtcttgctctgttgcccaggctggagtgcagtggcacgatctttgctcactgtaacctctgcctccagggttcaagtgactttcctgcctcagcctcccaagtagctgggactacaggtgcctgccaccacacgcggctaatttttatatttttagtagagatgggtttttgccatcttggccaggctggtcttgaactcctgacctcaggtgatccacctgccttggcctcccaaagtgctgggattacaggtgtgagccactgtgcctggccttgttttttttcaaatgagaaaaaaaaaaaaaaaaaaaaaaaaaaaaagactatggttgaccttctatttctgtggattcaaccggcctctgattcaaccaacctcaaattcaaccaactgcagatcaaaaatatatttcttaaaaagtgtgtggtattacagtataataataaaaaactgatacaaattttaaaaacaatacagtgtaacaactatctacatagcgtttaccttgtggtaggtattataagtaatctagagatgttttaaagcatatgggaaaagatgcaaaggttatacgcaaatactaggacactttacataagggactcgagcatctgcagactttggtatcctagggaagttctggaaccaatcccccacggataccgagggacgactgtattgtgcttgcgtgaatcagtctgcgcctgggtaaagtctgacttgtccaaaaacaatggaatccacatgaatgaagcttttctatatttagtaatagagccatcgatgaaaaaaatgataaactcattgtgagatgtaatcaacgtgcttatctctgaacatcattttatttcttcctcgtcaggtaccagtgcccagcaggctgcctgaaccacaaggcgaagatctttggaactctgttctatgaaagcgtgagtgtggccagtcctcctctcaatggcttgtgtgggatcctgttgcatatgtttaaagcaggtggttggctttagtaggaaaagattttctttccactccttagtcaaacctggcatttctagaactggggcgggtgtatatttatgggcttacaaactagcaaagccactttcggggaccaatcctcctgaaggccagtctccgtcttagactgagcattcacacactggaccgagcagggagaaagggatgtttgtcactcttcttagtttgtaaagcaactcagatgagtttttaaggtaagcaaccccaggaacaaatatgtggttacagacagaggcgagaggcaggagcagagtgagctttggcctgtccttcaggcttttagtgagttgaggacaaatgtttgggtatttctggtgaaacttgctgacagaggttgagaatgtgcctctggtcttctcttcccttcccgccagtcgtctagcatatgccgcgccgccatccactacgggatcctggatgacaagggaggcctggtggatatcaccaggaacgggaaggtccccttcttcgtgaagtctgagagacacggcgtgcagtccctcaggtaactactctgtgatcggggctctgtgaaacggttttcctgtttatgacggtgttgttgaaattttgaaaaataccacacaggccgggcgtggtggctcacacctgcactttgggaggcagaggcaggtggatcacctgaggtcaggagttcaagaccagcctgaccaacatggtgaaagtccgtctctactaaaaatacaaaagttagccaggcgtggtggcaggcacctgtaatcccagctactctcaggaggctacggcagaagaaccgcttgaggccgaggcagaggttgcagtgagctaagatagtgtcactgcactccagcctggccaacacagcaaaactccgtctcaaaaaaaaaaaaaagaaaacaacaacaacaaaaaaaaaaacaaaaaaaaaacccacagctctaactctaatgcaaatgtgtttttataatttgatcatgatattaataataacttctttgtaatgttttaaatttatcttcttaaaatttctttattttgcagctgtggttagattaaatttatcttatacatttgaaaaccattattcttagaagggatctataggcctcaccaggctaccagaagagtccttggtacaaaaaaagttaagatgccctggtctagaacattctaagagctctcaggctgataggaaacaagtagaaaagtgtgaagtcgagactgcaaataagataagtataggagcaagcgttcacttttagaagcaattctatttgcatttacctaatgcccgttttttttttttttttttttaaacagcaaatacaaaccttccagctcattcatggtgtcaaaagtgaaaggtaagctagccagtctcttttgcgaccataatacctgggttatctcagattttcctggaaatttcacttcctttagtcgctgatttaatgtttatcatgcgtgtgaacattatggttctcatcattgtcaagcctttttcaagacgtcatctctttaaccagcttctaagaatatctggactggaaattggcctgagatcactgaaccagaaacacagggctgaggttgccagctgaatgtcacagacatactgatgcctggggctaaagtggctgagaggtttcactgggagtgccactttctgtcgattggtaatggctacctggagtgttgtgttaagaaggattctgaggcctccatctgggcttagtggaaaacagagcttgatagattagtaatgtctgccatgagcaagagagggaagtgaagggaagtgtgtggcacttacttgccatctctggcccagctttttacattgcttagtgtatgttcatttggaaggtgggatgcacgatgggcgagcacactccaaccagaagtgaagggatggatcatagctgcccacactgtgcccttgactagaataatctcaggcaagcaaggatgtaggagccattccagcttcctccccggagctctgccggcagaccatgcctttgttttgggacagcaactcttatcatttgccctcatgcaaaagttctagttagatatctttattaaaatatgtagtagttttttttcttattgcaaaaagaatgcctgtttattccagataatttaaacacggagtggaacatttttttgtagtgatgacctaaattccagcagccagagataaccatcgtgaacactttggcaaatattccagtttgttttctctacatattcaaagtatgtacattggtaatatatacatcgatgacttttaaaacttgaaatggagttacatacaatttggtaacctaatttttttcttaaataattatgtgtctggctgatgcagcagctgacacctgtaatctcagcactttgggagactgaggcgggaggattgcttgagcccaggagtttgagaccagccctggcaacacagcaagaccctgtctctgcaaaaaacacacaaaattagctgggcagggtggcacacacctgtatctcagctacttcggagtctgagatgggagggttgcttgagcctggaaacttgaggctgcaatgagtcatgttcatgccactacactccagcctgggtgacagagcaagaccctgtctcaaaaaaatatatacatatgtgtgtgtgtgtgtgtgtgtgtcaggaatatatttctgtgcctttaaatcaagcttgtccaacccacagcccatgggctgcatgtagcccaggacgactctgaatgtgcccaacacaaatttgtaaacatgagaaacatgagatttatgcatggactttttttttttttttttttttttgtagctcatcagctatcattagtgttagtatattttatctgtagcccaagacaattctttttccagtgtggcctagggaagccaaaagattagacacccttgctttttttattttattttttattttgttattttttgagatggagtctctctctgtcgcccagcctggagtgcagtggcgcaatttcagctcactgcaacctcctcctcatgggttcaagtgattctcctgccttagcctcctgagtagctgggattacaggcacccgccaccatgtccagctaatttttttttttttttttttttaagtagagacggggtttcgccacgttggccaggctggtcttgaactcctgacctcaggtgatccacccgcctgggcctccccaagtgctaggattacatgcgtgagccattgcacccggcctggacacccttgctttaaatgttcttccaaacctaatgtgaatgatctccccattgaatagaagtcccttgatgtactaaaccagtcccctttgttggatagctatatagaaccatggcctgttcaagtgacagactggaccagcagggttcagcaaacgatgactcatgggttaaatcctgcctattgcctgcttttgtaaataaagttttattggaacacagttacacctattccacatcatctatagctcctctctgctacaacagcagagttgattaatcttgacatcaaacataaggaccacaaagccaaacatgtttgctctatggtcctttaagaaaaagtttacctggccgggcgcggtggctcacgcctataatcccagcactttgagacgtccaggcagatgggtcacctgaggtcaggagtttgagaccagcctggccaacatggtgaaaccccgtctctactaaaaatacaaaaattatccaggtgtggtggcaggcacctgtaatctcagctacttgggaggttgaggcaggagaattgcctgaacccaggaggtgaaggttgcagtgagccaagatcatgccatggcactccagcctgggcgacagagtgagactccgtctcaaaaaaaaaaggccggtgcagtggtttccacctgtaatcttagcactttgggaggctgaggcaggtggattacctgaggtcaggagttcgagacaagcctggccaacatggtgaaaccctgtctctactgaaaatacaaaaattagctggctgtggtggcaggcgcctctaatcccagctactcgggaggctaaggcaggagaatcagttgaactcaggggtggaggttgcagtgagccaagatcgtgccgtttcactccagcctgggcaaaaagagcaaaactctgtctcaaagaaaaaaagaaaaagaaaaagtttacttagccctgaactaaataaagacatgctgtcagagatcacaggtggccagtattagaactgtttccttacctgtgttgtttaaacacaacaaaatgaccttgaagataaaagcccctcgcccctcagcagggatgaatgtgccttgattagcggcaggaggtaggtggtatgtcagaaggagctctagagcaggcactggaaagctgggctcccacctcagtcctgggaagggcactctgagctctctgagcttccatttcctcatctgcctacttagagtaacacctgctgtgaggagcaaaggtgatcaagtcaggaaaagcttccaaataagaaagtcaccattcagatgaaaagcaccatcagccccacagagaaaccactgggggtgacaacgccctcaacccgccaacacatgcaggccgtgggtttggtctcatctcttaagtgcccctacgtggggtacgaggagcctgctgggtcgtagtcccagctctattcaagggcccagggaacccataggccctggtagtctagtggcccattgcacagcctggtagcctgaggcccaggcgtgctgggacctgaccctttcccccttgctcctgttcacagtgcaggatttggactgctacacgaccgttgctcagctgtgcccgtttgaaaagccagcaactcactgcccaaggtaaggcgggcctgatctgtcatcttttctatggaagatgttagaagtagctttttaggctgggtgaggtggctcacagctgtaatcccagcactttgggaggccgaggcgggtggatcacttgaggccaggagttcgtgaccagcctggccaacatggtgaaaccccatttctactaaaattacaaaaattagtcagccatggcggtgggtgcctgtaattccagctacttgggaagctgaggcaggagaattgcttgaacctgggaggcggaggttgcagtgagctgagatcacgccattgtcctccagcctgggtgacgagtgaaactgtgtcccaaaataaataaaatacaaattaaaaatcagctttattgaggtaaatgatacgatccacccattagaagtaaacgatgtgtggccgggcacggtggctcacgcctgtaatcccagcactttgggaggccgaggcaggcggatcacgaggtcaggagatcgagaccatcctggctaacacggtgaaaccccgtctctactaaaaatacaaaaaaaaaaaaaaaaaaaattagccgggcgtggtggcgggcgcctgtattcccagctactcgggagtctgaggcgggagaatggcgtgaacccaggaggtggagcttgcagtgagccgagatcgcaccactgcactccagcctgggtgacagagcgagactccgtctcaaaaaaagaaaaaagtacacaatgtgttttggccaaggtatacagggtcacaaccaccacccgtcaaagtgtagacattgtcagcaccgaatgtcattactgctctggtggccagtccctctccctccagctcccggccacacccctgcaccagggagcttctttctgttgctctgattttgctttttcagcaaaattatggcgccgtggcagggtgtggtcttgggtgtctggcttctcactctgcgtcatgtgttggagactcagccgtgttgtggagcgtgtttgtttattctttcaaatcctcatgcagcattccattctgtggatacgtgacaacgggtttgtcccaggaatcggttctacaggcagctaaccccaaatgagtggtccacggaggacgatgcctcccagcataaaataaagggtgtcctgggaacagctgtcgctgaagttcctggtagatcctcttgggaagggaacacaggaacatcctcttatttgaatcggctgaggcaccttctcaggtggaaaaggccgcaggtctctgggacgtccccactttatagatgttccccagggttcagatcatataatacatctgtaatgctaagctgcccttcaaacagagcacgctttctgacttagctccattgtagaattagaaatagaatgacagtcccaggaccctgggttgaaatgctttgaggatgaagacagctgccctggaggctgggtggtgtggccctcatgagccctcatcctgggctggagacctgtggattctccaagggacaataggtggtgaccccaaggttccgagcagggaaaggcccaggagggtgactggttgggaggggcccagactgctttcccttgactgccaccccacttcaggctttctctgggcctccactgcctccgcaccaccgtcttgatcccccttgaatgttcgagtggggataacagccttttagtagattttccctgaatattagagagaagcagaaggaaagaatttcagaaaatacaaacagaaaaacttgacacagtgcaatatgcaaaatgttaatttctgatctgccattccaaaagaagtaggaaagaatggagactgttcttagactctttccaattcttttttttttttttttttgagactgagcttcgctcttgttgcccaggttggagtgcggtggtacaatctctgctcactgcaacctctgcctcccagattcaagccattctcctgcctcagcgtcccgcgtagctgggattacgggcctgcaccaccacgcctggctaattttgtatttttagtagagatggggtttcaccatgttggccaggctggtctcgaactcccgacctcaggtgatccacccacctcggcctcccaaagtgctgggatcacaggtgtgagccactgcacctggccttcttttttttttttaaatccacacacacaccctttctctctacccactcatttcccttcctcccagcccctaagaactgtttcaacttctcagtccctttgcctggccttcttccttcccataatcctgcctgcctggggccagatggcttccggctgccattttggtttcttggtccctgggctccagcccacggtggactgttccagataaacacagaagatcttttcttaagtaaagcccgtgctctttcctggcttgagtttgtcaaaccacccaggggtcacccatttccagtttgaggtgctttcctcatgccctggaggatctgtggtgactgacacacagtgatctaaccccttccaccccaggttatcagtgcccccgccttggaatattctgtgactcagcgaggtgagggccctccaccctttcctcctccacacagggaagcggccttagaaaaagtctcttgatgctaatctccataatgtacccacagtgtgaactagccaacatccaagaatgggaggggcagcctcacaattccacactcttctctcttagatttttattctctttacctttttgtttgtgcatgtcttttgtggatgtgtgtgtgtttttaaaaattctatctacactgtttaagagaagcaaaaatagtaatatctttacctctgctgaggggggagaagtattgttttttttcttaatgaggaaaactgtatggcggtttcctttcatctacgaacttaaatcttggaattcaaataaagagagccagcttaagaagtttggttttctgtgctcagacccatcacataaatgcttcctgtttttcagaatccattgtccggcacactgcaaagacgaaccttcctactgggctccggtgtttggaaccaacatctatgcagatgtgagtaggatgcattttcaacaactatctcgcaaagcctgttaaagacctcaacatgcaagctccaagatctggatacttgaaactttattccagtgcctcttagctaaattaattaattaattaattaattaatttcgagatggagtcttactctgttgcccaggctggagtacagtggagtaatcttggcccactgtaacctctgcctcccaggttcaaacgattcttgtacctcaacctgccaagtagctggggttacacagtgcaccaccatgcctggctaatttttgtattttcagtagagacagggtttcaccatgttggccaggctggtttcgaactcccaacctcagatgatccgcccacctctgcctcccaaagtgctgggattccaggtgtgagtccccacacccggccaacctcttagctaagtttagaccactcatttctgcaaacattttccccatttccccatttctagagatagtagtgcttctacctacctgtcctcacaaatgcagattcaggagtgcctggccttacttaaatgttttcgcagtttgaaggctctcatgcttcagatagttcatttttccggctatttagtcatcttcccagctctccggatgcatttatagaaactggtccacgcactgtatttcttctcagttatgcacacacttagctaaaagcacaaagaagataatacagaccaccctaatttactgcttgttgatagccactctggttataccaatctcttcctctgttttttccctccgaattttaaccagggagctttagcccggtttttcttaggtggatcctgcagaacattgtctgttccctctggttgtccagggtttggggacatggtgacccagacaatgtgactgtggtcccacttctgctgccagcaggctgtgtgatcttgtcaagctgtttccttgtggcggaacggcccagaaccgggattatcaaatccagggaatcttctagatctaaaattctgtgattagggcagcatcattcatctctagctaatgttttttatttttttattttctgaatagaggcaaggtctcactatgttgcccaggctgatctcgaactcctgggctcgagcgatcctccctccttggcctcccaaagtgctgggattataggggtgagccactgcacccggcctccagatagagctttactcagctgcttgtcatcatcccctcctttacagctctctcccgcttccccgccatcatctttgcctctgtctgccttaatgtgttccagattcctgtaaatatgaggtcactgggctctgtaaggtcagagcaggcttcatgactaagcttatctccccccatcttttttctttcctctttaaatgggtctttttttcttcttgaaagtgattcagctaaaattgagttataagagttagaatttttatgaaggagtaaaataatattgtcgattattacaccaaatgtttgaaccaaattctaccattaagagacagaggctgaggttttcaaatgatttaaaaataaagagctgggcaaagcaatcccagccaaatacaaacaaacacatgaaaagcaagagtggcaatattcctctctgaaaaagtggaatttaaagttaaatgtactgaatgagacaaagtaatgttacacaatggcacagaagatacaatttacaggaaaaggaataaaaactgtacacaccaaacaatatagcagctaaaccaataaagcaaaaaaaaaaaaaaaaaaaaaaaagcaagaacttaatggatatttgcaacaatagaaggctacttttttttctttttttgagacaagagtttcactcctgttgcccaggctggagtgcaattgcacgatctcggctcactgcaacctcccaggttcaagagattctcctgcctcagcctcccgagtggctgggattacaggcacccgtcaccacacccagctaatttttgtatttttagtagagacggggtttcaccatgttggccaggctggtctcgaacccctgacctcaggtgatccacccaccttggcttcccaaagtgttgggattaccaacatgagcctctgcacccagccagaaggctaccttttattcaacacatactatgttttaggtcctttctttaaaaacaccgtctctaggtatcgttatccttattcctgtaggaagaaaacaaggctcatagtaacctgtccaaatccacacagtgagcacgtggcaaaggtgacaaacaggtgaacatgtgtccggctttcgactctgctctttccctggtgtatgctgccttgcttgatgttacctgcattcatagctacactgatatgaacaggcgtgaggggaaaaagctatgtgcagtcttcattaacaagtttcactaggattttgagcttttgggaccactgtgctcatgacagggcttgacagacaatcattgtttgttggaggaataaataaatgaagatactgcagtactcagtacttaagtagctcttcaaaaaaaataaagaatgaaggagggaagagggaaggagggaaggaagaaagccacctccgtgtgagaggttcttttctggcctcagtttctaggtcactgtattctgggaaatgatgatggcttttggaaaatgtctatttagctaagagattgattttgggagagttgcctccagaccttcaaagggcctgttcctgcctgcggctcccgcctgttcaccaggactgcatttcctggcagacccctcgctgtgtggtgagctgcagacagaagcatcggggtgtggcccagggagctgagccacggcggtgacatttgccagttgtgggaagccaggcaacctttcccctcctctgaacctcagtcttctgtcctccccatcccacttggtgcttggatacgttctcacacttgtgcacatatcagaatccacccccgcgcctgcctgagggctggaacagatttctaggcctcaccctcagcattcaggatcagtggggctgggtggatccagagaatctgcattccaacaagttcccaggtgaacctgctggtctggaactgcatgttgaggaccactgggctagcgatgacaatcccttgggaattttctattgtggtggtgactatgacaatcatggaggtggcatttgtcttgactgacgcctactgagcatgtgctgtgtgccatcctgcgttaagcctggggtcttatttaatttttttttttttttttttgagacggagtcttactctgtcacccaggctgaagtgcagtggcgtgacctcggctcactgcaacctccgcctcctgagttcaagcaattctcctgtcccagcctcccgagtagctgggattacaggtgcccgccacccacacccagctaatctttgtatttttagtagagacagggtttctccatgttggccaggttggtctcgaactcctgacctcaagtgatctgcctgcctctgcctcccaaagtgctgggattacaggcgtgagccaccacacacagcccttctttaatcttcacagtaaccctcttcttcctcactgtcatcaccctaggtgggacagtggacagattgctggctccgggtggcagtcccgcctctgatctttatcagctgagtgatttggggcaaggtgtgagcccccctgcccctcagtcacctgagtgttcaaagcgattgataatgacaacacctacccggcagagttactgggatcactgtgtcaatgcacgtgaaatgcatagaacaaagacatgtaaagatatgacctgtgaccatccctgctttatatggagaaaggcggggctctggggttcacacaggtcatcccaagtcacacagccagccggcgctggatgcaggattggttaccagcttcatggatgtcaattgttagtaaatactcaggtattcctgttgcagtgggccctgaggagaggaattggatgccttgtcccttttactgaagcctgtgagaggagaggtgtggaggaaggaagaaaggaggaaaggtgtttgcgtgggagatgtgcatattgataacggggcggtaccgggcctgtggagtgagaaagatccggccatgggtgtgagcttttcgtactgacgccctgcagcttgatgttatcacagaaaacttttgtgtcacttttgtgtccagaaatcctccagggactgagtcaaagcaccgcctctggggctgccaaccagaacctcttggcagctctcaaccaggagggtgcccctcccccgccagggcttttagaggttgagtttgtgacaccgaagggatgggtccctcctggcgttccactgggaaacagcctgggccttgctcctggtactgcagcagttggcagtgcgagcaatgctgagagagacagaaagcctggaggtcttatttcatcttgttgttgttgttggaaatgcagattctctggctccaatcaaccattgatcctgaacgctgacagtgggacccaaaaatctgctccagccctcgggtaggggcgggggtggattctgaaacaagcacaagtgtgagaacgtatccaagcaccaaggcttccgcctgccggaaagaacaatgagcttaattgtgttcgcttaccaaactcgcccccgctcacggcgattttagaggaattctgaaatggtcgcttcatcttaaagtctcctcgcttctctttgagatggatgcaaagttattgctccttagtctttagcagggcacaaagctctttgagaattgagaagttgtggatctttcctccaaagggggaaaatgcgtcctggttcagacagggaggccggccatccccggtttgcctagggctgaggggattcctgtgtcctgtgctgacatcagcccctgcaggtccacggccttctgcctgcaactccagggcctcccagatacccgggaccccgctttgggctaaggaaccccgccctcatccgtttagtttatttattgaagaagatgaagacatgttagcacagagtttttagaaagtggccttcagttactcggtaaatgaatcctggaaagcaggaaatccacttttcaggtctttgatatgaatgtgtgttttggctccacttttctcttttgttttttatttttctgaataggcttatgattgttaatgtgggaatgttggatcccttcttttttttttttttttttttttgagatgggatctggagctctgtcacacaggctggagtgcagtggtgccatcacagcccactgtgacctcaacctcctgggctcaagcgatcctcccacctcagccacccgtgtagctggaactacaggcatgtgccacaacatctgactaacgtttttaaattttttgtagagaccagatctcgctatgttgcccaggctcatcttgatccatgcccagctaattttctatttttagtagagatggggtttcaccatgttggtcaggctgatctcaaactcctgtcctcaggtgatctgcccacctcggcctcccaaagtcctgggattacaggtgtaagccaccgcgccggccaaattggtattttcaaagagcccgcctctcttcattccctcatgcctggaacctgctagattgtattgcttgtcccatttaaagggcagctcagggtgcattttccagacaaactgtgcttttacagtggatcctgagacacaggctctctttggctttagcaatgcttccggggcccccggatgggccgaggacagtggtaaggacgggacaaaggagctatgagactgtgccagggatggtggtgggctggcctctctcgagggggcactgattacttctgcaatggctccctgagcttgggtgtagctccccactcccctctctgttgtagtaaaaaaaaaattcaccataagccaggcaatggctcacacctgtaatcctgaggttttgggaggccaaggtgggaggatcgtttgaggccaggagtttgagaccagcctgagcaacatggtgaaaccccatctctaaagaaaatggaaaaattagtcaggcgtggtggcgcatgcctgcgatcccagctacttgagaagctgaggtgggaggagcccggaaggtcaaagctctgatgagcccagatggtatcaccgcacttcagcctgggtgacaaagtgagatcctgtcccccgacaaaaaaatacataacattaaacttaccctcttaaccattgttaagtgcacagcttattagcattaagcatattcacgttgtaatgggttcgacctccagaactcttttgtcttgcaaatctgaaaccctgtacccactgaactgcaacttcccgcttcccctccgccagcccctgtacttcctgtctccaggaatttgacttctttggatgcctcctataaatgaaatcatcccagcttcatcttctccaccatgtcttgctctcttcttgaaggaggcaccagcttggtgaaccagtggctgggacttcatcttctccccgatgacccctggggctcgggtattgtgcagaggggagcgtttcagaggtgacatagcccagccccgccctcctgctgagtgacccattggtgggggttaagcttttaagctcagacctgctggtggtggcctctgtctctacactacacgtgcagggaggacagaatatggggagtctgccccgttcaccctccccacccttgaaccacaaagtgcctgggggctcagtccactgacagccacggccgtgacatcactcggttgtgaatggaggcaagaccggagtccgtcttcgtgccctgtagacaacgggtccagcttttcatctttccttaaattagcaagctgctgccggggactgatcaggcgagtccgtgagcctgggtgagcctgttgtccagacacttatggtgtcattctcctggggattctatttcctataaatttgaagtcaggccgggcgcggcggctcacgcctgtagtcccagcactttgggaggccgaggcgtgtggatcacctgaggtcaggagttcgacaccagcctgaccaatatggagaaaccgtgtctctactaaaaatacaaaattagccagacgtggtggtgcgtgcctgtaatcccagctactcaagaggctgaggcagaagaaccacttgaacccaggagacagaggttgcgataagctgagattgcgccattgcactccagcctgagcaataagagcgaaactccgtctcaaaaaatagatagataaataaataaataaattgaagtcatcagacttaagggacttaataaatcagatcgctagatccacccacagtgggggacatttttgtggacagtggttagaagctgttaggttcctattactgttagaataaatcaccacagacgtggtggcttaaagaaacccaggtttattatctttacagttctggaagccagaagtccaatgtgggtgtcaccaggctaaaatcaaggtggcagcagggctgcttccttctagaggcttcagaggagaatccgttttcttgccttttccggcttctagaggccacctgcattcattggctcatggcctcttcttccatcttcaaaaccaacaattgggccgagtgcagtggctcatgcctgtcatcccagcactttgagaggccaaggcgggaggattgcttgagcccaggagttcaggaccagcgtgagcaacacagcgagaccttgtccctacaaataatttttaaaaattagccaggtgttgtggtacacaactgtagtcccagctacttgggaggctgaggtgggaggatcccttgagcctggaaggttttatcacccagaaactgaactccttgatgatgtcagaaaccagcacatcctgcctctgcgaggtacccagctgctcccttggtacctagaatagtccagacgccaccctgtgtccagtctacatggcatgaatggcccctgcccacacctcctgccacgctctgcctgactcactgtattccagccaccctggctgtctgtctgtttcttggatatgatgagtttatatccaccccagggcatttgcacgagcctttccctctgcctgggatgctctgtgcagagacattcccacggctgtgactgtttcctttatgtcgttctgtcttccctgagcagttccccctgatgaaacaattctgaagtagcccccgccacccaggcatttaaccttgtgaactggttttgttttcttcatagccgatgctacctcatttgtgtatttatttatttgctcactcgactctttgaaggcaaggtctttatcttgttccctgctgaattcccccagttcctaattccgtgcctggcatataataggtgcttagaaaacacttgttgaacaaatgaatgaatgcatgatgtccagtctctctggagagacccccaaggcatcaaggtagtgatgattatttcctaagggttgatggggtccacatcccaccagccaggttgcccagcagtgaatgatggagccccagctggcttgacccatgagctggaatccgcatcgctgatcacagcccttcctgtgcttccagacctcaagcatctgcaagacagccgtgcacgcgggagtcatcagcaacgagagtgggggtgacgtggacgtgatgcccgtggataaaaagaagacctacgtgggctcgctcaggaatggagttcagtctgaaaggtagggtggtgttctccaacccttgacacccaatcccggctgctaatggtccctcagggggcctgggaagaggcccagagtcattaccctttaaaataaaactcgggtagacttgcacgaattcttaccaggactcccaggtaagagacttctttgcttttctctttcttttgtttttgaaactagggaatgcttttccctactatcacatttgggattaagaaaaaaaaaagaactttttttcctattaccaatggacgtttttgtagaaaatttataatctgtaggaacatcagataagcccgaagataaacagtcatccataactcatcagctgggagaatttactgttagatttcttggcgtgcgtccttccggttgtttttctttgtgtgtgtgtgtgtgtgtgtgtgtgtgtgtgtgtgtgcatttttttcccacaaaaaaatgggatcaaatgatagttacatactagtcatataaagctacatcgtaatatagttacatagagttaaataagattagggagcctggagtccaacagacctgggccctgtttcttaccagctttgtgaccccgagtaagccacctgatttccttgagcctcagttttctcatctgtgaaatagggataatcataaaccctgccccacagggctgttgggaggtgaacggaaatggtgcctacctattgccagtaagaagtggcagtggctgggcgtggtggctcacgcctgtaatcccagcactttgggaggccgaggcaggcagatcatgaggtcaggagatcgagaccatcctggctaacatgatgaaacccccgtctctactaaaaatacaaaaaattagccaggcgtggtggcacacgcctgtagtcccagctacccgggaggctgaggcaggagaatggcgtgaacccgggaggcggagcttgcagtgagctgagatcgcgccaccgcactccagcctgggcgacagagtgagactccatctcaaaaaaaaaaagaagtggcagtaagaagcactctgcaaatgagggttatgttgattactccgtatttccactcgagaccatacctttatggaaatctatgaccataagtcattggtagtgactgtgaatgactgtagcgcgtttctcttcgtagctggtgtgagtcctttccatcccagggagcagatcctcccctagtaagtagtcttctccaggaatgcttgcacacaccgtgactgtttccttaaatccctagaagtgggccgggtgtgatgacgcaagcctgtaatcccagcactgtgggaagcagtggtgggtggatcacctgaggtcaggtgaggcaggagaatcacttgaacccgggaggtagaggctgtagtgagccgggattgtgtcactgcactccagcctgggcaacaagagcaaaactctgtctcaaaaaaaagaaaaaaagaccaaacaaagtccctagaagtgaaattcctaagtggggcctttcctgagtgtcattcagaaagggcactcagcctcccaagtagctgggattacaggcatgcaccaccatgcccggctaatttttgtatttttagtagagattggatctcgccctgttggccaggctggtctccaactcctgacctcaggtgatctgcctggcttggcctcccaaagtgctgggatcacaggtgtgagccaccgcactcggccgccatgattatctctttaaagatctgcaaatacagtcacattctgaggtgcacttgagggttaggacattaacatatggattttgagggaccacaggcgagctcgtaacagggcaatgttgaagatttcatatttgagggacgttctttagagaaggaataaaatcaaggctgtaacttgccctgggcccctggacgctcaggccttcctgcctcctgggacacggcccctgcttccactgccagcctcctgggcactttgtgcagcgggcttgccctgtctgtgaagatgccacagcatcacttgtacccagatcgtgcccattcttcccgggacccctgcccggtgactctgccatcggcagccctgaagagcccaagtagacagcttccacgttttctccttcagcacgtgcggcctttgattgggaaaagcttaatgaagggaaattccactgatttaatgggagggaaatgaagcagctgattaggaggaatttcctggccgggctggaaagaaatcccaggacatcaatttattgagctctttgtaccctctttgagagaaaacagtcttcctgagcagcgcagccagctgggatttgttccctgtcgggctgattcatgagaacatcacagcagtgccctgtgggctggggacagggacctcattgtgggggccccattggtaggcccctggggagggcagggatggagagaaggcccccgaagcagctttcccacccgccccactatcacccagggtgtggggggctgtcggtctttctctcttcctgtgacacccacccaaatcgccactgtcgctgtctttgtaggtgtcttccaggcatccctcccaagcacacatgtcactggtgccttctgtactctagaaagattttagtgattttctgcagcatttccagagttaagactttgcttttcttgctcctcagactctctgctcctccgtcctgtggactggcatctgtgataatgcttgggttcagcttttctgtgcctcagtttcctcacctataaaggggggaataatattacctgccccctggggtggtggcagggcaggaggtctccaggtggggtccccaggccaacagtgtccagatcaacccagagcttgttggaaaagcacatcctccggccccacccagctctgctgaatcggaatctctgggaggggcccagcagcctgcgtctgagcaggtcctcgggggcatcgtgctgcatgctcgactgtgacagctgccgttctaagagtcacgcgaacctggcaaacctgacacaagtcagtcagcacacacgtcccacccttgctccagcctggcctgggggagagtgcagagcctgttagatgtggaaataacagctcaatagtttctgtttcttagggtttctggacacatagagggattttcagtgacccaacccttgagattctcagcgctgagttgtccagtacagtagccaccaacggtgggtgctcactgagacctaaaatgggcttatcctgagcccgtttggagatgtgcataagtgtgaaaaacacaccgcatcttcaagattttatacccttgattctgatattattttgctactaagagtcattcagccaggcgtggtggctcacacctgtaatcccagcactttgggaggtcgagacgggcagatcacttgaggtcaggagttcgagaccagcctgaccaacatggtgaagccccgtctctactaaaaatacagaaattagctgggcatggtggtgcacgcctgtaatgccagctactcgggaggctgaggcaggagaatcgcttgaaaccaggaggcggaggttgcactgagccgagattccaccactgtactccagcctgggtgacagagcgagactccatctcaaaaaaaaaaaaaaaaaaaaaaagtcactcattcactgaatattcatcacgcacctgtgctgggacccagggcacagatgattgagccctagaactcacagctcagaaggggagtgagcactggagcccccaacagggtgatggccgggacagtatgtggcgcccgctgcactggggacactgctcccccagtccccagcagggtcaccttgggcagtctccctgggccttggcagctcctctctctaatgggttgccatgagaattatgtgagaggtgtgtgtccagccctcggctagcggctcacagtaagcatgacatgaaacccaggggcacctgttgccacaacttcaaaagatgccatggttcttttctcatagggtcaggtggctggatcctaagaaatggcctacatgacttatctctcaggatgaggggtcagggatcttccaggaattcattctttcatccttgcttccatccttccaacgctcactccatgcaggcatcatacacttagggagcgctgacgatgtccctggcacccaggatcccacagggagcacaacagcagacctctgccgtcatgggatttgccatctagtgagaggacacagtgcagaaatgacaatgccagcagcagggcccagggggtcactgttgtggagggacagttcagggaggcatcaagagggctagtcttactgtccagaggggactccttggggacatggctcccaagagaaccctgcagagacacctgggtgtggccatgccctgtcctttccttatttaggtgggatctcagccaccatctctgcacaaagcagaggctgggaaatttcccaggagcttattcccaataggggctgtggaaacccagcctggagtcagagggtggctctgtccctgacggctggtaagcccttggcgagggggcggtcacaggcagtcccaagggagacgtagatgttgtatatactgtgaccagttcacagcaaactgtactttaaatgtagggaatccttcaatcacacaaaccaccaaaacccccaaacaggattctcagcacacggggccgaaggtcagttctgcttcacagtggttttggtttagcaatgatcctcctctagaagaggacttcctggacgttttgaaaggcagccatgcagaaatgaggcaacataagagactagcacctgctctctcacccctgcccacctgggtatcaaaggaaagaaaagacatcaggaagagctttcaatactgggacgaaggtgtctgaatattcttggggaaatgccggacatctgggtgaatgtcagttcagaatttttcttagaccagaaccattttttaacacagattttgcaagagattgggaaatatataaacaatgacagtgagcattcttggccacttgattttttaaaatgtcacctttatacaaaggtatatatgggtgcacagccatctgaatcgcaaattcattcacctaacactcatgggcagcccctgcgctagggactggggacactgccgggaacagaagagagaaaaatccctgtcctcataggggtgtggtctgctgtggcaagtgcagcagagatatgatgtgagcacacatgggattctaaagtttctagaagccaaaggaagaagtaatggaagggaaattttaggatgcattttacttatcccaatatatccatattatttcagtatgtaatcaatagaaaattattattagaaataagaaatttacattcttttttgggtataaggtcttggagatctggtgtgtgtttcacccttaggcacatctccatttggacgagcccattttgggtctcagtgagtacccacggctggtggctactgtattagacaactcagcaccgagaatctcaagggtcaggtgactgaagatctcgctatgggtctagaaatcctgagaaacagaagatactaagctatcatttccagatctaaggagccctgcactctcccccaagccaggctgccccgaggctgggacatgaggttctctgtgctctgcagaggagctgctgatagcagacaggcaggttcccctcctccactcgtattccaaacttccaccagctctgcacacgttagcacatctcattccccaacagccctgcaaagtaggaaccgtcattatccctattttatcagtaaaggaagggaagcacagagaggttaaacgacttgcccaaggtcacccagcctaccaggggcagagctgggactcaaacctaggccgcctgtaccagaatccatgcttttaagcagcactcatgacttcctcagcctggacaggccactgaacttggggcacagacccttcccaagaaggggccagggagacccttgaatgccaagatatacttgttcctgtctttacgatacaagaaatacatacttattatttaaataatacatccagagagcaaaaagtaagagtcccaacaggtgccctgttaacctcagttaactgctgatttataacttttcttgacctgtttttcccccgtgcacataaaactcacatacaaatcaaaacggagattgtattatacgtgctagtctgaaacttttcccccctaagaataatgatatatttcatcaaatgagatgaagaggtttgacagttccctagagtgtgggctttgtgaggatagttcactcaccacttgtgcatacccagcctgcgttgcccacattctcactttgaagggagggcaaggtttaaacctagcaggggcgatggcatttgtagctcccggctactgagcacctgctggatgctcgcctctggcccaggtacctccctggagaggctcatggactttttacagtgtccctaaggagtgggcactttgaggaacccagtttacagatggggaaactgaggctcagagaaaagggttaaccagcccaaggtcctaaagatgagagctaaacctgtacctgtctaactttgaaattttcctgagggatcaatagaggggtgagactctgggagaacaagattggaatcctttttttttttttttggagatggagtctccctctgttgcccaggctgggatgcagtggcgcgatctccactcactgcaacctctgcctcctgggttcagtgattatcctgcctcagcctcccaggtagctgggattacaggcacccgccaccacacctggctaatttttttcatatatatatatgtttagtagagatgggatttcaccatgttggccaggctggtctcgaattcgtgacctcaagtgatccgcccacctcagcctcccaaagtgctgggagtacaggtgtgagccaccgtgcccagccaggattggaatcctttaaaaaaaaagactatatatagagagagacacacacacacagacacatacacatatacagacagtcttagacacttaagatcgttcaacttatgacttttcaactttataatggtgtgagagccatatgtattcagcaaaaaccatacttcaaattttgcattttgattgaaaattctttatactaacttccttgtaaaataggcctgtgttaggtgattttgctcagctgtgggctaaggtcagtgtcctgagcacacggaaggtaggcgaggctgagctgtgatggaggcgaggtgtattcagtgcatttccgatgtggacttctgacttccgatgggtttatcaggacgcgacccaccgtaagtcagggagcatctgtgtccacagtcatgtatgtacactcatacatatagagacagttatatacatataaatgatatttcttaataattaaaaataaattacactttttaaaagccagaagactaagcactcaggggttcctcttctgccgtccttttagtgctggcttcaggactccacagggcagcttccctgtctgcctctggaaccagaaccggccgtccaccctccttaatcccgtctgtgtgttgggtgatgccaaaaggcaagctcttcctcctcaggtcactttcaaggcaattgagggggatgcagccccacgtgcctgtccctggctggcctctaggagggagccccgtgcttctggggagctcttcagagagtccctggattgttcctgcccctttactctggcctttaaagggcctttctaggccgggtgcggcggctcatgcctgtaatccaggtacattgggaggctgaggtgggaggatcacatgaggccaggagttcaagaccagcttgaccaacagggtgtaatcccatctctactaaaaatacaaaaaaaaaaaaaaaagccgggcatggtggcatgcacctgtagtcccaggtacttgggaggctgaggtaggagaattgattgaacccaggaggtggaggaggctacagtgagtggagattgcaccactgcactctagcctcggtgacagagcaagaccgtgtctcaaaaagactagagaaacctcaacaatatagtgaaaataattttaagatcttcatagcactcaacttcccatacccagaaacaacctctgtaaacattccagtgtattttctttcaggtttcttctgtgtttacatataaacacgcctttttttgttgtttgtttgtttgtttgagacggagtttcagagtttcgctgttttgcccaggctggagtgcagcggcttgacctcggctcattgcaacctctgccccgcaggttcaagtgattctcatgcctcagcctcccaagtagctgggattacaggcacccactgccaggcccggctaatttttgtatttttagtagagacggggtttcgccatgttggccaggctggtctcgaacccctgacctcaggtgatccgcctgccttggcctcccaaaatgctgggattacaggcgtgagctaccacacccggcttaaacacgctttttaaaaagggattatgctattagtattgttttgttaatcggattgtggctagctcttcaagccctagcctgtctagccacaccgtggtttcagtggctgcacagattcggaggcatggagagaccatcatccgtttatcatcactgattgacactcagatcgtttccttttttctttcactgtaataaacaacactagaaagaacatttttgcgcaagcctgtgcactttcttgccgatttatttaggtgacttcctcttaccagaacagccacagccaccaaagtgctgtcctaatgcaatgcacagtgtcgcaccaaggaaaaaagtcagcacatcctttcctgtgtaaggctcccccgccagtggctttccattgtactaagaatcaaatccgccccactcccattcaaggccgcagctgcttcggcccctgcccgctcccccaccctctctgtgcatcttcctcctacatttccacctcactggcctctctgctccttgactgcaccaagatcatgcacacctcagtgcttttgtagctgctgtctggtaccctctgggctctcatacgttcctgggctgttttagactgaaatggcccctccctaggcagcgttctccaccatccagcctgcacttgtctcctgctccctgatggatctgtgtcatttcccctgactcatcaccttctgaaactgtttcttgcatatgttttgctacttctcaccccaccccagactgtaaacttcctgaaggcaagagcctcactggtcttgttaaccccacagccctgatgctgcccagcacttggcacatagcaggtgctcagtaaacactggttgaatgagactttgctgagttgagcaattggttcagagttggttgagggcttttatttctcacttatagtcccagttgcaccactgcactccagcctgggcaacataagtgagaccctgcagcctcaactgcagtgagctgtgactgcaccgttgtactcctgggctcactgcagcctcaactgcagtgagttgtgattgcaccattgcactcctggactcaagcaatcctcccacctcagcctccctagttgctgggaccacaggcgtgcaccaccacatctggctaatttttttatttttgtagagacaggggtcactgtgtcacccaggctgatctcaaactcctgggttcaagcaatcgcctacgttagcctcccaaagtgctgagactacaggtgtgagccactgtgccccgcctgagggattttcaataccctgtatcaaagttgtttagtgctctttatgaaagttgcttgatacacttgataaaaagtccaataccttttatgaaaattacccagaaatactgcagcaatttatactccttcaggcatgtatgggagttacaagctaatccaaaaagagaatcagagggcaagatttgggaaagaagggcgggaagggtattttataattatcaagccacactcgttattcatcagacacgtacaactaccaacttccccagcatacctggagcttaataactgcttgaggcatgaacaactggggacactgaaggtggggaatttttcttggtgcccaaacctgcgggaatttttacctgtggcggtggatggcaccaacagttgatgctgccagttgcacggtggcatcctgggcggtgtcagcacattctttgatgtgttaggaaatacttgcccagcttgtcggggcctgctcttacctccaaggtgagcaggttgtttaatggggtgcatggttgtccaggcaagatacccagggcccttgggctggccatgtctacatctggacggcagcctgaatggttcccttgtcccttggttgtttggggccctgagaacatgagaacccactgcaccgtccatagaatctgcagacccatagtaagtcaggagggacacagacccctggtaattttccccaacgtggcttgccccccatgcagaataaccacagtaacttgtggccctggttggttctcccaggatattcacttggacagagaattcagggaaatcttacatcccccaaggcctgaggagggccctggaatctgaactttccagaaaccagcagggccgccagggtcaccccagcccctggccactctttctcctcctcttggtccggagccacctgcggccaagcgttctgcctgggtcttggctcttggcgtttctttgcagctccatctctccgagtgctcccatctgatacacgtttcaaaagttcaattccagggtagccaaaagtgtgaagctgccatggagaagggctaaaaaacaaccaggaattccaagcggcctgctctcggaggattgcagatcttagcagcctgagagggccggggtctcctggctagtctggcagtttccaatctgggggctctctttgtttggagcggagatcctaaaggaaaccccgcccagaaatggtgactaggctgttaatcttatactcaaactccttcatcatgagcaagatgcaaatgaaaatgatatctggatgccactccctaccttctattggtcaagaaccaaaagcaagacatcacacagcgctgggaggcatcacacagcgctgggaggcatcgcacagccccgttgtcattgtccggggagtctgcaggtgttatctttatgcagggcaggttggcagctgtcaagatgcaaatgcacgtcctttggtccagcaattccactcctaggcgctcactctcaggcaccctcacacaaaagcaaaaagtcccatggacaacaatgacattgtttgcaaaggtaaaaaattagaaaacacgggctcaatggctcgcgcttataatccgggcactttgggaggctgagacggaaggattgcttgagcccaggagttcgagaccagcatgggcggcatggtgaaatcccatctctaaaaaatacgaaaattaaccaggcatggtggtatgcacccgtggtcccagctactggtgaggctgaggtgggagtatgacttgagcccaggaggttgaggctgcagtgaatcatgatggtgtcactgcacacacacacacacacacacacacacacacgcaaaaaaaaaaagattagaaagaactaaatgtccaccaatagggatccagttaaatataacactttattacaatggaatactatgcagtggataaaaagaatgagttctttctgtatagtaaagcaacaaatcccgagatatattgttaagctaaaaaagcaaagtgcagagtggtatgtctatggcagtatgtatataatatttgtgttgaaaaaatgggtgagggaaaaaatataataattgttaacatccacataagatctaaacatctctcctctggggagaacttggtgcagaaagacagggttgagagggagagtgttttttgccttaaggattgtgtgttcaacaactaaaatgtgcggctatgattagtcttttccattttaattttgatgtggaaagaacactcctggctgcactttttttttttttttttttttgacgcagagtctccctgtgtcgcccaggctggagtgcaatggtgtgatctcggctcattgcaacctccacctcctggattcaaattattctcctgcctcagcctcccgagtagctgggattacaggcatctgccaccatacccagctaatttttgtttttgtatttttggtagagatggggtttcaccatcttggccaggctggtcttgaactcctgacctcaagtgatccacctgcctcaacctctcaaaatgttgggattataggcgtgagccactgcacctggcactggttgcacttttttttttttttttttttttttgatgcagagtctcactgtatcgcccagggtggagtgcagtggtgtgatctcggctcgttgtaacctccacctcctgggttcaaatgattctcctgcctcagcctcccaagtagctgggattacaggcacctgctaccacacccagctaatttttgtttttgtatttttggtagcgatggggtttcaccatgttcccatgctggtcttgaactcctgatctcaagtgatctgccggcctcgacctctcaaagtgctgggatgacaggcgtgagccaccgcgcctggccctggttgcacactgtgaacaacgctttggggtctacaaggcgccatgctgccttctagaacaaaattccaacaaatgcgagtttgcaagatcttatcggcttttattagcaattcatgtatcaggcaatatcccaagtacagaatagaaaggtgcttccacgaactgagcagcgaggggaggttttagagtcagcaaaggctgcatgcagagagtacaaacgatgaacaggccgggcgcagtggctcacgcctgtaattccagcactttgggaggccgaggagggtggatcgcaaggtcaggacatcgagactatcctggctaacaaggtgaaaccccgtctctactaaaaatagaaaaaaattagccaggcgtggtgttggacacttgtagtcccagctactcgggaggctgaggcaggagaatggcatgaacccaggaggtggaggttgcagtgagcagagatcacgccactgcactacagcctgggtgacagagcgagactccatctcaaaaaaaaaagaaacaacaaaatttggatgggtcgtcccagttacttttcttgtaggattaaagcaggaaggccacactatcctgctggctcagagggactgggggcccttttgattggttgttgctgtgtatctcctattttttggaaaatcggcccattgctttttttttttttttttttgagacagagtctcactctgttgcccaggctggagtgcagtggcgtgatctcgctcaccgcaacctccacctcctgggttcaagcgattctcctgcctcagcctcccaggtagctgggattactggtgcctgccaccacagccagctaatttttgtatttttagtaggggtttcactgtgttgagcaggctggtctcgaactcctgacttcaagtgatctgcccacctcagcctcccaaagtgctgggattacaggaatgatccaccgtgcctggcctaaaaccagcccatttctaagttcagtttgatgaggtggcacctagcagggtgactccgatctgatttggtttggtctgttgggcctagcccagtccaaaacaatggcctcccgtcaatttaatgctcccctcctcccaccttccgggtctcctctccagcctggccccttcctggacctcccccaagaacccaggtacccccaacatcggcactgtcacagaacattccggaaagtatccttagaagcctgtaatcccagcactttgggaggccgaggcaggcggatcatgagctcaggcgtttgagaccagcccggccaagagaccagcctggccaatatggtgacaccccatctctacaaaaaatacaaaaattagctgggtgtggtggcgcatgcctgtaattccagctagttgagaggctgaggcaggagaatcgcttgaacctgggaggcggcggttgcaatgagccgagatcacaccgttgcactccagcctgggcaacagggcgagactctgtcttaaaatttaaaaaaaaaaaaaaaagcccaaagagacttagtgactttgtcacacagttactaaacgttagtgtagggatggagactcgcgtctggaagacatgctccagaggtgagatttgcagaatgccaaagcaggatgcatgggaaatcttattcccaaaagcagtgttcaaaaacagctgtttcaggactccagaaatacaccacagagtcatacaacgaacagggaggtgtttgttcaaaaaagtgtggacctcagataagaacagagggatctgtggtgtctgagcctgggaccgctcctgttcaccccaccagctcctgtggctggaagttctactggggtggggctgtgccatccagcggctttcttgatttgaagcagagcgaggaaaaccacacacctctggccattgtcaggaacagtatcaaacctggtggccaagacacaggaaggccagttggtccaaaggtgcagttatcatctggggcagaaaatcagggaggatctagagaatgagacagccgtggtggcccttggtaggctcccaggcgtccctggtgttctagaaggctgtgcccacagcaagaggagcaaagcgggagggggcacttaggcttcccaattctgaaacatcctatacagcgacagtgatcaagatggtggtgctgacatcaggacagacacagagattaagagaacgtgattgggcctggtacggtggcttacgcctgaaatcccagcactttgggaggccaaggaggggaggatcacgaagtcaggagttccagagcagcctggccaacatggcaaaaccccatctctgctaaaaatacaaaaattagccccgcgtggtggtgtgcacctgtaatcccagctacttgggaggctgaggccagagaatcacttgaacctgggaagcagaggttgcagtgagccaagattgcaccactgtactccagcctgggcaacagagcgagactcggtctcaaaaaaaggtaaaaaaaaaaatttaaaaaaaaaattaaaaaaaaaaatgattggaagtccataaaataaatcatcacacttccagtcaattgattttgacatcggtgccaggaccattcagtgggcagagaataatttctcaacaaatgatgcaagggcaattagatatttacaagtaaaactgtgatgttggacctttgcctcacactatatataaaaattaactcaaaatggatccaaggctgaaatgtaagagctaaaaattacagatgtctgagaaaacaagtataaatccttcatgaccttggatggtttgctagatatgacgccaaaagcacaatctataaatgaaaacaaattgataaattgtattctatcaaagtttaaaacttttatgccttaaaagacaccattaggccaggcacggtggctcacacccataatcccagcactttgggaggctgaggcaggaggatcacttgggcccaggagtttgagaccagcctgggcaacatagtgagactccatctgtacaaaaaataaaatatatcaatcaggcttggtgacatgctgctcaggaggctgaggagggaggatcgcttgcactcaggaggtcaaggctgaagtaagccacgatcatgccactgcactctggccttggtgacagaccttgtgtctaaaacaatttttaaaaattgtctaacactggattgtggagatgactgcacaactctataaaatctctaaaaaccattgaattgtacacttagaaaggttgagtttatacggtatgttaaacttaataaagttggtttggttttttttttgttttttgaaacagagtctcactctcttgcccaggctggagtgcagtggcagaatcttggctcactgcacactccacctcccacgttcaagtgattctcctgcctcaaccttcaactagctgggattacaggtgcacaccatcatgcctggctaattgtttgtagaggcagggtttcaccatgttggccagactggtctcgaattccagacctcaagtgatccacctgccttggcctcccaaagtgctgggattccaggtgtgaggtgtgagccaccgtgcctgaccaataaagctcttttttttttttttttttggagacaaagtcttactcttgtcccccaggctggagtgcaatgccttgatcttggctcactgcatcctccgcctcccaggttcaagtgattcttctgcctcagcctcccgagtagctgggattacaggcgcctgccaccacatccggctaatttttgtatttttcgtagagatggggtttcaccatgttggccaggctggtctcgaactcctgacctcaggtggtccacccgcctcactcccaaagtgctgaggttacaggcatgagccaccgcgcctggcctaaagctcttttttaaaaaccatctttgattagctgaaggatttaactcctcttgtgagagggcagtttttactagccatgggaccctgggtaaatctctttatttcctggtgtctccgtttcctcccctgtgaacgagcgataacagctccctcaggaggaaggtggaaggcggtgaagcacctggcatatgcagtagtgctgagatagcacctgttcatctctcccaagacaccactgttcgggttgacaggtggtagtgaaaccaagcagaattctcggagggtgagtccaatccagacagactgggtccagcagatccctgagttaaaaggaaataacttaacagccttgacctagaatcagatggatgctcatgtgcagagaaaatgggatttgccacctgttctcaactcaaggcaggctctgtgtctggcggcttcaaggaagtgtcccttggccatggctcttccactacgggagcaagcaggaggcacccaggtctccctgcccacccagagtccctgcaggaggccctccagatctctcagtaacgggccctctttcttctttttttcagcctggggactcctcgggatggaaaggccttccggatctttgctgtcaggcagtgaatttccagcaccaggggagaaggggcgtcttcaggagggcttcggggttttgcttttatttttattttgtcattgcggggtatatggagagtcaggaaacttcctttgactgatgttcagtgtccatcactttgtggcctgtgggtgaggtgacatctcatcccctcactgaagcaacagcatcccaaggtgctcagccggactccctggtgcctgatcctgctggggcctgggggtctccatctggacgtcctctctcctttagagatctgagctgtctcttaaaggggacagttgcccaaaatgttccttgctatgtgttcttctgttggtggaggaagttgatttcaacctccctgccaaaagaacaaaccatttgaagctcacaattgtgaagcattcacggcgtcggaagaggccttttgagcaagcgccaatgagtttcaggaatgaagtagaaggtagttatttaaaaataaaaaacacagtccgtccctaccaatagaggaaaatggttttaatgtttgctggtcagacagacaaatgggctagagtaagagggctgcgggtatgagagaccccggctccgccctggcacgtgtccttgctggcggcccgccacaggcccccttcaatggccgcattcaggatggctctatacacagcagtgctggtttatgtagagttcagcagtcacttcagagatgtatcttgtctttgtcaggcccttcgtcttcatggcccacctgttttctgccgtgacctttggtcccattgaggactaaggatcgggaccctttctttaccccctacccgttgtggctcccaccctgcctcggactggtttacgtgtcctggttcacacccaggacttttctttgcaagcgaacctgtttgaagcccaagtcttaactcctggtctcgtaaggttccactgagacgagatgtctgagaacaaccaaagaaggcctgctctttgctgcttttaaaaaatgacaattaaatgtgcagattccccacgcacccgatgacctattttttcagccgtgggaggaatggagtctttggtacattcctcaccgaggttagcagctcagtttgtggttatgaaaccgtctgtggcctcatgacagcgagagatgggaatacactagaaggatctcttttcctgttttcgtgaaacgactcttgccaaacgttcccgaggcgccaaggagtgtagtacaccctggctgccatcactctataaaagtgcttcatgagcccagaccaaaagcccacagtgaaatgaagtacccttttgtaaatagcatttttttgcagaaggtgaaaattccactctctaccaccgggccagccaatagatcactttggtgaatgctagtttcaaatttgattcaaaatatttcttaggtgaaagaactagcagaaagtcaaaaactaagatactgtagactggacaagaaattctacctgggcacctaggtgatgccttctttctttgattgcctttctaataaatgcagaatctgaaggtaaataggtttaaaacaaaacaaaaacccacccctttaaggagttggtaaaaagcagttcaactcttagcttgactgagctaaaattcacaggactacgtgctttgtgcattgtagtctagtcgtaattcataggtactgactcctcagccccaaatgtcggagaggaagaattcggtcagcctgtcaggtcgtgagtccagttaccaccaaacatctgggaaacttctgggtgctgggtgctctgctgctggacttttgtggctgtgtctgtgtctgcaagataaattagatcgccctgtggggtttgcagaattagtgaagggtccaggacgatcccagtgggctcgcttccaaagcatcccactcaagggagacttgaaacttccagtgtgagttgaccccatcatttaaaaataaagtccccgggttccttaatgcctccttcactgggccttcctagcaggatagaaagtccttgcccagagcaggacctggctgtctttttttttttttttttttttttcccgagaccaagtttcactctgttgcccaaggtagagtgcagtggcgtgatctctgctcattgcaactgccgcctcccgggttcaagcaattctcatgcatcagcctcccaagtacctgggactacaggcgtgagctaccatgcccggctaatttttgtatttttagtagagatggggtttcattatgttggccaggctggtctcgaactccttacctcaggtgatccacccaccttggcctcccgaagtgctgggattacaggcatgagccactgcgcccggccatggacctggctgtctttatcatccccacaaacattttgaaactggaatatttgtcttcagaaaatggaaacaagactataaatgataagccctgtccctagcaccacctctcctgtgtgtggaatagaggcccctcgtgctaccaacacttaccctgtgtttaaaaagatcttgtaccaagccaacggcgttcctggctctcctgcccacaggatgaacattttcggcttccttaggagttttgccctaccgtattccaaagcgtgtgctggtttctcatattgtctgtaggctcactcagcccgcagtttatgtgtgtgcttttttctatgaaaaatgatgtattttgctacttcctgtgtacaaagttttattgtaaatgttttttgtgctttgcatgaacaggggccacgttgttgcaattgtttcagtagaactggtttgatttctaaaatgttcctgtaacatatcttttatgaacaaatctgaacaatttgtgaaataaaacattgaaaaccatctttcaggctctggactgttttgtgttggctgcttctgctaggatgtctcatatacacagagatgctgacagccagggcctggtggagacctccaccccatccgcgggaaggagggaggagcttgccaaaatgcaatttcgggctcagcaaggctgggttggggccagggactgtgaatttctcccaagatcctggtgatgcgaatgctgccagtccccagatcacactctgagtggtggtgggctcaaggccattctgtctaagctccggctgccctaacaaaataccatagactgggtgacttaacccacagagatatcttcctcacagttctggaggctggaagtctaagatcagggtgccagcagcgttggtttcctctgcggcctctctttggtttgcaggtggctgcccctggccgtgtcctcacatggcctttcctctgggcatgtacactcctggtgtctctctctctctcttataaggacaccggtcatattgggtctgggccccacccttaggacccatttaacctgaattacctccttaaaggccctaccttgaaatacacaggctggctcatgcctgtaatcccagcactttgggaagctgaggcaggaggatcacttgagtccaagagttcaagagcagtctgggcaacatggggaaaccttatctctacaaaaaaaatacaaaaatttgccgggcatggtggcgcatgcatgtagtcccagctacttgggaggctgaggcaggagaattgcttgaccctgggaggcagaggttgcagagagccaagatgacaccactgcactccagcctgagtgacagagcgagacacacacacacacacacacacacacacacacgaaagaaatacattgggggttagggatcgttttgtgtggttacaataaggaaatgatcaaagtacgatttcacaaatcacacagtttattgctacacaaagatgttttttccttaggttcccagtgcttaaacagggagagaatgagaccaaacctcacagagaatacactcgacagacgaagcccattaaccccacagtgggtcagttccagaatgatcaaggcctacttgctcacttaggatggaagcaggcctcagtttgaggtgcaccttctaccagccgttcttggaagcgctgtaaggtccctagaaggcagttccagcgctggccagaggcttctgagagtagctccaaggctggcggggtgacctgtcacagctggagctcccagctttgggagaagatgccgagggtgcagccggccacagccagagctcccaaagggtccgtcccactggcaggtttgcatgtgtatggaagtccagtcgtgagggtcaggagctcgcagacggggtccgataaggggtgaggccacattctccagggaagaaggggcacaccaagttcttagcgcagcaaaacgcgtcacccacgtagcaacctgtggaggtgtctggaatcatttcaaa
